United States Patent Application Publication US 2006/0024696 A1 - sequence listing, part 3

SEQ ID NO: 10368 - protein, 189 aa, Lawsonia intracellularis
MTEKEKARNGLLYDANTDPLLIEERLRCKELCYEYNQLHPIKMEERRNIIKKLFGKTGEHFLIEQPLWCDYGYLIEIGENFYANHNCTILDTAKVTFGNNVFIGPNCGFYAAVHPLDVLQRNKGLEYAYPITIGNNVWIGGNVIVLPGVTIGDNSTIGAGSIVSKDIPDGVLAFGNPCRVIKSIPATKN

SEQ ID NO: 10369 - protein, 302 aa, Lawsonia intracellularis
VAVEYKDYYKVLGVERNATKDMISKAYKKLAKKYHPDLNPGNTEAEEKFKNITEAYEVLKDDEKRKMYDQLGSNWKDGQYFQNESGFDNFSFNFGGDAFGGSGFSDFFESLFGGGQRGRSSGFSGFSSRQHRGRDIEAEISISLEDALHGGERSFTLQTPDGPKTLKVNIPAGVREGAKLRLAGQGYSGSGGGATGDLYLHIRFLPHSQFHVENNNITYNVQIMPWEAVLGTKIRVPTLEGNVELSVPAGTSSGRKMRLRGKGLGSSNSRGALFVIIGIKTPTNLTDKQRKLWEELAANAEK

SEQ ID NO: 10370 - protein, 103 aa, Lawsonia intracellularis
MDLLQDKKDLPSCSRFIVWSEFIELTGTTPERVFELIEIGWLEPVRTAENILLFQQRDVYKLRKLERICMDFEIDTLSGSIIIDLLERVDSLEKRVRMLSSLY

SEQ ID NO: 10371 - protein, 877 aa, Lawsonia intracellularis
MDVNKLTQKSQEALSEAQRLSAQYGHQEVDVEHLALALTIQENGFVPRVLEQAKVHVKVVISALEEVLKKRPSVRGPGSEMGKITISQRLSKVIANAELLAKRLGDEYVSVEHLFAECLNEPESTGMGQVAKEIHLTSQRFIEVMLAVRGPHRVTSPTPEDSYEALKKYGRDLVEAARKGKLDPVIGRDAEIRRVIRILSRRTKNNPVLIGEAGVGKTAIVEGLAFRIVQGDVPEGLKDKSIFALDMGSLIAGAKYRGEFEERLKAVLTEVEKSEGRIVLFIDELHTIVGAGKADGAMDAGNFLKPMLARGELHCIGATTLDEYRKYIEKDPALERRFQPVMVDEPSVQDTISILRGLKERFEVHHGVRISDSAIVEAVVLSDRYISDRQLPDKAIDLIDEAAAMIRTEIDSLPSELDEVNRKIMQLEIEREALRKESDSASHERLVRLEEELKVLQSTQSELKKQWETEKGSIDSLRNIKEQIEQTRLAIDEATRNGELSKAAELKYSKLFELEKQLEERESKADGPRLLKEEVRPDDVANIVARWTGIPVTRLLESEKEKLLRLPDTLHERVIGQDEAVNVICNAVLRTRAGLSDPKRPQGSFIFLGPTGVGKTELCKALAESLFDTEENMVRFDMSEYMEKHSVARLIGAHPGYVGYEEGGQLTNAVKRKPYSVILFDEVEKAHPDVFNIFLQLLDDGRLTDNAGRTINFRNTIIIMTSNIGAYKLLEGISPDGSFHEGVYESVMGDLKQHFRPEFLNRVDDVVLFKPLLADQISSIIDLQLRSLKKRLESQKVTLELTHSAHLYLAENGYDPHYGARPLKRYLQRVVETPLAKMIISGKVHENQQIVIDYSESDSSLQYGVKSASEDINWVQV

SEQ ID NO: 10372 - protein, 252 aa, Lawsonia intracellularis
LIIMTRRTMTEPIITIRNIWKFFGSLTAINDVSLEIIPGEKVVIIGPSGSGKSTLLRSINRLETIDKGLIIVDGLDINSSENDINTIRQELGMVFQNFNLFPHKTVLQNITMAPIHLRKLSTHEAEEQALQLLKKVGLSDKINVYPSYLSGGQQQRVAIARALAMHPKIMLFDEPTSALDPEMVTEVLEVMKTLAEEGMTMIVVTHEMGFAREVADHVIFMDKGQIVETGPPETIFTSPQHPRLQQFLKQIL

SEQ ID NO: 10373 - protein, 261 aa, Lawsonia intracellularis
MQNTSIRIEITDGASIPDPRERNIINAWNIAFFGSILLLVLLCSFGSENYIDILAFLPDGIFVTFEVTFLSIICTLPLGLLVGFGRLSKNRIINILTSTYVEVIRGIPLLVQLFYIYYALGHFSPLVSAIIAITFCYGAYMGEVFRAGILTVPKGQEEAARSLGFNKYQTMRYVILPQALRAILPPIGNECIAMLKDTSLISIIAVADLLRRGREYAAVTFEYFETYTVIAIVYLIITLLLSKGVSIMEGKLDHYDQENYD

SEQ ID NO: 10374 - protein, 249 aa, Lawsonia intracellularis
MLRTFGFLSILTILSIFSSTSIAKDIYIVASDATWPPMENLDEHKKVVGYSSDYITAVAKEAGINIEIRNTAWDGIFAALNADLIDIIASSVTITDKRKQKVMDFSKPYYNVHQAIVVPNGSPIKSIQDLNGKKVGGQIGTSGLIETLPKAKVKAIVKTYDEIGLALEDLSNGSLDAVICDEPVANYFIKQQPEYTDHITIAFITTEIEQYGFAVKKGNKELLEKINAGVKAVKEKGIEAALIKKWIMH

SEQ ID NO: 10375 - protein, 197 aa, Lawsonia intracellularis
MKKVWNIFFDRDGTLIEDKHYLSNPRDLVLLPNVGLALEKLIKNGCHLFLVSNQSGVGRGLFTETSVLACHKELTRLLAGYGVFFTDALWCVHAPSENCDCRKPKLGMWKALSQKHRLTASETIMIGDKCDDISFGVKAEFLASILVKTGKGEQEAIKCGYRFPEKGCAPMEVTKNKSTCILTTQSIMDAVSWILQE

SEQ ID NO: 10376 - protein, 435 aa, Lawsonia intracellularis
MKFTSFDDVQNFLDNLGLFNIDLELTRMNQALTKLDFNSLPYKVVQIVGTNGKGSTATFLASLAKSHGLKVGIYTSPHFVTPRERICINGEMLSPEVWITLTERILDNTLSLTYFELLTVLAIVAFSEFKVDLAILEAGLGGQHDATTAVPADLVCYTPIDLDHEQFLGSTVEAIAKEKSQAMRFRKPVLSSFQQPEVMSILCAMAKEKNCSFQSLEQISLVYDLFYPNLDGSQTKSEYLTLGMAGKHQRVNAQLALAAWHVLSQNFGWDFNLNCIYKGLAHAFIPGRFQYVPPNPSLGCLPTILDGAHNPHGLEACIAACKSIGIRPGAIIFSCFADKNIKEMVELVQIFAEGIPLFIPTIQVHERAMCSNELAKLFKCSVQPVQRLSIALQAIKNSDIEISEKRPIVILGSLYLIGEFFTLYPHVLSSSIGMI

SEQ ID NO: 10377 - protein, 478 aa, Lawsonia intracellularis
VVSSMNMLLRQLPSVDICLHAIFKEDTTLYTVTPRLLLRELINTFLDKLREDVKSGNITDSSFLTLDYILPQLLTFIKRHSSLNCCKVINATGVILHTNMGRSILPQEALQAINTICSGYSNLELNLKTGERGSRYSHVVGLLCKLTGAEAAIVVNNNAAAVLLTLDTLCKGKEVIIARGQLVEIGGSFRIPDVMEHSGTKLKEVGCTNRVHLKDYENAITVDTAAIMHVHTSNYRVIGFHSEVSLKDLVMLSSKHNLLCIEDLGSGSFIDFSQYGLLGEPTVQSVISAGVHIVTFSGDKVLGGPQAGIILGKKETITQIALNPLNRALRIDKMTLIALESTLKLYLDKKQAVTRIPTLAMITISPNLLEEKAKNILSNLKKICGEMIECSIVPGFSQVGGGAFPEYNLPTSLIYLHPTICSSEKLKMQLLDVSPPILGRIEKSAFCIDPRTIADTEIDLVTTAISQAIDAINIINNK

SEQ ID NO: 10378 - protein, 117 aa, Lawsonia intracellularis
LSMAIKIIEHSPFCIVKIIDSLSIENAIAIQQELENIFVTSVTLGELVLDLSNVQNVDFSGIGGVIAALFFARAKGITVILYRPTKHIQEIMWKMQTNNLFPLILSEEELIIHALNS

SEQ ID NO: 10379 - protein, 376 aa, Lawsonia intracellularis
MKMYLQHYFNPDFDYLQLQPIVSVKGQADLYNLGYVQNVVKGQVIAEMIPLEAIENPIPRFVLEQEKFPQGPNTYIDPAYPHYLLSDVNGYVFYYNGKISVKKVLNVRSNVDFHTGNIAFVGDVMVHKDVKAGFQLQANTIIINGMVEGGEVRSRKDMKIIGGARGGVSNRCLLSSGGSLHVNFTEKVELRSKKRMIVERFCMQCKVYAEESFIVSGLVAGGIIQVSKHVFIKEKLGNTSGIPTHIFLGYNPFLLRKLESCDNSLGILSEKITNYKTIIDQSSSSTDEIHQKLEEVVQQHNQLSKYRNTIWKLLQLDEAKAFSCRLVVPGIVYPGVELSIGNASFSVKEELNNVCFRLHENEIIYESVPATLLPFF

SEQ ID NO: 10380 - protein, 567 aa, Lawsonia intracellularis
MNKYIQYDENGDIIDIIIQIQDRSISMLGSGGKIREKKIASHFITALQKAEMSSKVLPVLLGSGAGYALKEILENTTSPIAVIDKEFFLNDTQLKEKITDQRINWICSSNIEEVFSALTHWQIQHGRLPLYPLVHPFYFRIDKPWYQKIKQYVAASTRFDFWSKAIRPRFSTAEPRLLLITTRYFLLGVIEEACNRLGIPHQIITIQDEETGCVEFVEQLLTSVATFHPDFILTINHFGVDKEGILVDLLAKLELPMASWFVDNPHLIIHEYGEVVSPWTAIFTWDENTLHSLKEYGYPHVFYLPLGTSQYRFRPRMPQDKPLSSVFPTHLSFVGNSMVYKVEEQIEKGNFPSILLQHYKNIASDFIYSDKRSIQQFLKETYPEYYKEYLKLPDVEQRLAYEAMLTWESTLQYRFSCVEQLLSFQPVIVGDNGWYELLSNYKDNWSYCPSVNYYNTLPSIYRFSDINFNSTSKQMKGAVNQRVFDIPATGSFLITDWQQQMDTLFEPNKEVVYYREVGEIRELVQYYLTHPNQRKSIASAARQRVLAEHTWEHRLQTLLEHMRQTYG

SEQ ID NO: 10381 - protein, 215 aa, Lawsonia intracellularis
LKAMDYGDILPLEDMMDSVQLNECIAFIQRAENLKNTLRSAHTSQGRQESAAEHSWRLCLLILVFAKYFEHADVNKLLRLAVVHDLGEAVCGDIPAIAKPDLDKKSETERRGMCELCTGLPESIYTEMLALWDEYELAETLEAKIVKGLDKLETIMQHNQGKNPPDFDYEFNLFYGQDAISVLPLLKQIRDVLDKNTRENVAIKNFFKHYDGGLL

SEQ ID NO: 10382 - protein, 262 aa, Lawsonia intracellularis
MIYGTSYESLSLFSKLYVSTCLLSCAHILVDQCGRPVPKMKIMLWVWPITALWAGIFGIWAYRVISHRNVLNSNEDNIATSLKKRKDTLEITRQQEVNILDKNIMQNMDMSSTEHNLNWKHIIKGTLHCGSGCTIADLIGPWIFRLLPFTLFGNMLYGEWALEYVLALIIGVFFQYAALASMTLHHGLSLWWRAFRVDFLSLTAWQIGMYGWMAIAIFLLIGPMSPTDPTFWFMMQIGMFCGFITSYPMNWWLMSIGIKKAM

SEQ ID NO: 10383 - protein, 128 aa, Lawsonia intracellularis
MKVHAVIIRSGILSINLFTIPLAVAHNFSDQFVVETSITQSIKDGYTNLKSNVEETMSSLTDEKNTDAEKYLEQHDKDLKAYQNEIKKADQNYMKARKEAQRNYMKNHSQLPMEEDIEKDMEHIKSGL

SEQ ID NO: 10384 - protein, 160 aa, Lawsonia intracellularis
MNNLPEKHENNEIIIKKNNTGDHNNEIDSSHFKEQLHTISEQALENIEKIIKKTKEVISHANEAMKETFDHLKEQLHHTSDHTKEQIEKASDKTKETLSDINIQIKYTIDSVKEQLHTSAEHTKKYIENTSDTTKKTIHNASKNTKQLFNNVKEKTKDIF

SEQ ID NO: 10385 - protein, 418 aa, Lawsonia intracellularis
MIKVSIIIPVYNEWQLTKTCLISLAKYTNNVHVYVINNGSSDETNLACPTLGNILFGSNFHYISFDTNHNFGPACNTGAYAANTDYILFLNNDTEVSYGWLPPLVEALDSDPYLAGVGSLLIYPDSTVQHLGVTITPDGNYVNHLYNSIPATIPLVHKKRKFKIITAACLLLHRKNFIDIGGFFNGYKNGLEDVELCLRLTEQGKYMMCIPESVVIHKESKTPGRKNKEAYNTSLFFKRNNISFLGDMDYFLQQDGYTVDITPSLWPYPTIHKSKQYDLLKSLSTPFNPLQCFDLLKEEPFWKHGRHLLVNWLEKNNEVSMALTLMIEELNLCKSLNIDELKYIITLCNRLGIDSHLFQQKINSLLKFILNKSNFLGTLKRIQYILNKTGRYELLKKYNQAAIQAQIIRNKIKTTSII

SEQ ID NO: 10386 - protein, 319 aa, Lawsonia intracellularis
MKYVVCLLCVILFYYFCSAGTLYDLWGPSLYSSFPSDSRNALPNDASIPKNYIPICSLPPLLNTIGTIRRVDVPGDKKVVALTFDMCELATKTTGYDTAIINFLRLHQIPATLFLGGKWMRTHSERAMQLIADPLFEIGNHAWTHGNFGIMSEAKMKEQVLWTQAQYEILRKQVIERIKLKNFLLPTIPECMQLFRLPYGRCTGQALKLLAELGFYVIQWDVVAEVHNNNSIQGLEQYVVKNVKSGSIILFHANCVPIGSAELLKKTVELLKRQGYQFVTVSTLLTMGKPQYTMDGYFTSPGDNLSLDTKFGIDGTGLK

SEQ ID NO: 10387 - protein, 295 aa, Lawsonia intracellularis
MEKLNVYIYIVLLIFFPSILLAKEFDGEKIFFMKNQSPQQQILSIALLTKNKKIIIFDGGTKADSNHLSSFINEHGGKVSAWFLTHLHDDHTGALSEILLDDNITIDNIYYNFPPPEWVEEHEPMYSSHLTMIVEPLKKMAYLNNQKKIQKGDTFSIDGVTITVLNDFDLSITRNGVNNTSFVYDVMIAGKRMLVLGDLGEEGGERLLAEYGNTLKADIVQMSHHGQRGVQKEVYTAISPRICLWPTPLFLWENDCSYGPSSGTWEINKVKTWMEEVGVRVHYVSGLQEDDIVIE

SEQ ID NO: 10388 - protein, 133 aa, Lawsonia intracellularis
MPDILLNTIQHDTYIPLKLHSDLTELTITLHKATQDLEMVKHQVKEAVKTLSDSSSNIDLSIPNKETKKQESHTKHTYVMYDNDDIPSETRCYYFPSLAVTCEQKLLKGENVTDFKGLLFNACTSISTFTSLL

SEQ ID NO: 10389 - protein, 242 aa, Lawsonia intracellularis
MKKYLFEAFDGLNRLAPGSTESTQQAIKLLPADFLPKKILDIGCGVGESTLLLAKHFSNAEIIAIDNNQQYINELESKATNNIKPKVMSMFEMDFEPESFDLIWSEGSIYIAGFQTGLKDWKKFLKNNGYFVCSEISWLIDQYSDASKYFWNEAYPEIDTIENNLQKIQSAGYKVLGHFVLPKSNWKENYYAPLQKNLERMKTTYNNDEKAQQVIALIQSEIDLYKENSDDYSYVFYIMKKI

SEQ ID NO: 10390 - protein, 612 aa, Lawsonia intracellularis
LSNNITNNNLRNIAIIAHVDHGKTTLVDALFRQSGIFREDQQVDDRVMDRMDLERERGITIAAKNCAVTWQGIKINIIDTPGHADFGGEVERALSMADGAILLVDAAEGPLPQTRFVLKKTLEAGLKIIVIINKIDRKDARVQEVLNEIYDLFIDLDATDEQLEFPVLYAIGRNGVAMRTLDDAQEGLVPLFETIIEVVPGPKYDPNEPFQMLVSDLSYSDYLGRLSVGKISHGSVHSKDALVCMNEEGVAIPLRVTKLQSYQGITLTDIESAEPGDIIVIAGLEDVSIGDTICTKNEIRVLPRLNIDEPTVAMRFTINNSPLVGKEGKIVQSRKIRERLFKETLTNLAISVEEAEERDSFIVKGRGEFQLAILIETMRREGFELSVGRPEVILQEKDGERLEPVEHLYIDCDESFMGVVTEKIAQRKGRMLNCVNNGSGRVRLEFSIPSRGLIGYRDEFLTDTKGTGIMNSLLSGYEPWRGDFPSRFTGSIVSDRAGSAVAYALFNLEPRGELFIVSGDPVYEGMIIGEHNRDNDIDVNPIKEKKLTNLRTSSKDEAIILTPVKPMTLEKALHFVKEDELVEVTPISIRLRKAELSAQKRHQIAGKKKTGK

SEQ ID NO: 10391 - protein, 366 aa, Lawsonia intracellularis
MSLQIGIVGLPNVGKSTLFNALTKAQNAQAANYPFCTIEPNKATVPVPDHRLEEIASIVSPQKVIQTTVDFIDIAGLVKGASKGEGLGNQFLAHIRECSVILQVVRCFDNENITHVEGNVDPIRDIETIETELLLADIQTVTQRIERLQKIAKNNKDAKVAVEEMNLLLLHLNSGNPASTFNEKKNEKLSSLWKELGLLTDKRIIYCANVDETNLIDGNNYLNSVKKIAEKNHTEMIVICAKIEEELQGLSDEEQAEILNSYHIKESGLIQIIQTGYNALGLISYFTAGEKEVRAWTIEKGWKAPQAAGVIHSDFERGFIRAEVMSISDFLQYKSETACRNAGVLRTEGKDYIVTDGDIIHFLFNV

SEQ ID NO: 10392 - protein, 152 aa, Lawsonia intracellularis
MQRCGLYIICLVLSIGMISCANFSASSFGGKQIRSAHIVEFGKVVSVKPVELEGNTPILGTITGGAVGGVLGSLIGGGSGRILSTVVGAGAGAVAGNIAERKITTQQGLEIEVKLDNGQIISIVQGADQSFSPGERVRVLRGSDGSARVSSI

SEQ ID NO: 10393 - protein, 830 aa, Lawsonia intracellularis
MTFDTNDDSIAKNSLAPYNQETEQQQEEGAMKINAGTEDDVQPQEIPSSIPILPLRDVVVFNYMIVPLFVGRERSIQAVESATTHGQHIFLCAQKDSQIENPTEEDLYSVGTVALILRLLKMPDGRLKALVQGISRARCLTIHNEDGYLTATVELLQEPQPTVKPTEQEALLRYAREQCEKILALRGIPTGEIMGVLSNVNEPGRLADLIAANLRLKTEEAQEILQCLEPIDRLHLVITHLTHEAEVATMQVKIQTSAREGMDKAQKDYFLREQLKAIRKELGDAIDADEEIEEVSSALNKAGLPAEVRKEVDKQLRRLSTMHADSAEAGVIRTYLDWIAELPWKKTSKDQLDIHKAKTILNEDHYGLVKIKDRILEYLSVRKLNPKSKGPILCFAGPPGVGKTSLGRSIAKSLGRKFQRISLGGMHDEAEIRGHRRTYIGAMPGRLIQAMKQAGTKNPVILLDEIDKLGNDFRGDPSSALLEALDPEQNHNFSDHYLNVPFDLSKVLFLCTANHLEHIPAALKDRLEIISLPGYTQQEKLAIARKYILPKQLKENGLKENELIISDTCLEKIIREYTREAGLRNMEREIGSLCRKVARKKAEGKKPPFRITTNQIEKFLGIPRFIDDDTEKTLPPGVALGLAWTPAGGEILYIEVSTVKGKGNLLLTGQLGDVMKESAQAALSYARSKASSLNISPDFAKSMDIHIHIPAGATPKDGPSAGVTLTTALISALTGKSVRGDLCMTGEITLRGRVLPVGGIKEKVLAGVARGLGHVIIPTKNTKDLEEIPQELKKKIKIHTVSHIDEVLPLAFSETIPVVTKKKQTKQPTS

SEQ ID NO: 10394 - protein, 226 aa, Lawsonia intracellularis
MPNDKPHHLGHRARLRKRLCNDPSEMAEYELLELFLGYVHLRKDTKPLAKKLLQQFGSIRGALDAFPGELETIPQFGEALSAFWKLIREIFARYAETPVREKIQLCTPKIVAEIAKARFTGCPHEEVWIATVDTQNRLISWERLSKGTIGSSPLYPRDTIEIVLKRKASGFILVHNHPGGSSNASSFDIEITRHLEHIAQSINLRLIDHIIVTEKNCYSIRNDGLL

SEQ ID NO: 10395 - protein, 325 aa, Lawsonia intracellularis
MIHQGFIFCICPDSTILQQQLEELVTAQYVSNKWEKSVYWGDEELPKKFWDNLTLQNLFTNKQIVVLRNAHLLPVDIWKNISSIISKPNQYLWLIFCLEAPWEKRQPKLPAHIQKLPCFIFAQKQKWIWSSPGVDERNLKQFIKTQATSIGLTFEPHTLETLSNLLPTDAATIKSELLKIKLSHSDSLPISTQQLNVISHTANTFDIFIFLKQLESGNALQVWTSILHEQQKEEDPLFFILTMLQREAKTLWQLLMGETVTGYPNELSKKTQLAKYIGIKGITKMWDALYFAEVTVKSGEGSSIQALETLISTLLPLFTKAQETS

SEQ ID NO: 10396 - protein, 175 aa, Lawsonia intracellularis
MYNKKITTTFYCIPLWFYISIFLTGCGYTWQGQEGYLSKRTILGDGTKTLCMNNIEQSTLYPWLPYMIRTQVRNDINARKLAIWVDSGPSDFTLTVRINSFQIRSAGEYKQHNLLFTATVNMELIIFDGKTNTEIWSSGPVIYSENYEHANEEQAIQEVIFMTTRRAIDQIQQPF

SEQ ID NO: 10397 - protein, 835 aa, Lawsonia intracellularis
MIMHSNYDPNIIEKKWQRYWEEQHAYACDIDPNKKKYYVLEMWPYPSGNIHMGHVRNYSIGDVIARIKRMQGYNVLHPMGWDAFGLPAELAAIKHHTQPADWTYTNINEMRAQLKRLGYSYDWQREIATCDPDYYQWEQLFFVDCFEKGLVYRKKAPQNWCPSCNTVLANEQVIEGSCWRCDTSIIQKELTQWFLKITDYAEELLDDLTTLKYSWPDRVITMQENWLGKSTGVEISFPIESSQDFITIFTTRPDTIFGATAIILAPEHPILETLLNDTPQKEKLYNVIEKMRNMDRLERQSNLLTKEGIFIDRYCINPCSGDKIPIWIGNFVLADYGTGAIMAVPAHDQRDFDFCKKYNLPISIVIQPDELQINEHTIVEPWTGLGTLIHSGQFTGLTNKEAKEKITQYLEKIGKATRVVSWRLRDWNISRQRYWGTPIPIIYCKNCGVVSVPKNELPVILPTNITINEDGSSPLPQESSFIDCMCPQCGGIAKRETDTMDTFVDSSWYFARFVDPKNTKQPFDTSIAKYWLNVDQYIGGVEHAILHLLYSRFFTKLLRDLGYLPSNINEPFAKLLTQGMVIKDGSKMSKSKGNIVDPNQMINIYGADTIRLFCLFAAPPERDFDWSDSGIEGSYRFLHRVWRLFIDVQPHIHTTHAGNSTVIETTTALTKDVKRKEHITIKKVSEDIENKYQFNTAIASIMEFVNTLYLSKNELILTVEGKNILSSAIATVLTLLSPMTPHICEELWSYLGHSTSISLEPWPKWDPQALLKDVVTIVVQINGKVRNKFEVPMDLSKEELEHIIFNDTKITQYLEGKTIQKHIIIPNKIINIVTT

SEQ ID NO: 10398 - protein, 161 aa, Lawsonia intracellularis
MPANKKHSRRIDRTKAFQVLYSLHFTQINTIETLKEIFLNLPNPLEERNTGIITELDTQISFSWQLVEGVWRNVTRLDKIISQFSQNWRVDRLGKIELTLLRIATFEMYYCPDVPPKVSLNEALELATCFGDEKARKFINGILDAIIKAIETEKINYIDKN

SEQ ID NO: 10399 - protein, 157 aa, Lawsonia intracellularis
MGQLNVIEGHYDASGLRFAILASRFNDFVVDRLISGSIDCILRHGGTKENITIVRVAGAMELPLVCKKLSLTSKFDGIIILGAIIRGSTPHFDYVASEATKGVVNVSLQTDVPIGFGVLTTDTIEQAIERAGSKAGNKGSDATLAVLESIRVIQKIS

SEQ ID NO: 10400 - protein, 422 aa, Lawsonia intracellularis
AWFLLKKKRDLNMSIYSVEDAIQDIRQGNMIILVDDEDRENEGDLVIAAQHVTPEHINFMTKYARGLVCLPMESTLIDKLKLPPMSQVNNSKFGTNFTVSIEARQGVTTGISAADRAHTALTAIDDNVQPEDIVTPGHMFPLRAQPGGVLTRAGHTEGSVDLVQFAGLKPAAIICEILNDDGSMARMSDLEIFASKYNLKITTISDIIRYKMKLGKLTVKQVARANLPSKFGTFEVIAYENGINSDTHLAIIKGNVNNTEDDSPVLVRVHSECLTGDVLDSLRCDCGGQLSAALRQIEREGRGVLVYMRQEGRGIGLANKIKAYALQDKGYDTVEANQKLGFKPDLRDYGVGAQILVDLGIKRMRILTNNPRKVIGLEGYGIHITERVPLEIASSRTNLSYLRTKQEKLGHLLHLCTTCQRS

SEQ ID NO: 10401 - protein, 221 aa, Lawsonia intracellularis
MFTGVTQGCGNIYSINHYGKEVRITVEPLFPLKIISTGESIAINGTCLTVEQYTSTTFTVYASLETLQRTNLGKLVVGNSVNLEQSIAVGERLNGHIVTGHIDCVATVQSIEKQGKSNCIKLIFPSKFSKEVVSKGSVTLDGISLTVNNCGSGFLEVNIIPATWNITTISNWKVGTHVNMETDIIAKYIYNMLNPIISSIHSNENKTTNITLDFLHKHGFY

SEQ ID NO: 10402 - protein, 382 aa, Lawsonia intracellularis
LSLQVNHPYDYAMKYAISIAEKGRWDTAPNPVVGSVLIQNGKIVAEGFHSLYGGPHAEVLCINDAKNKHINLSDCTLITTLEPCNHYGKTPPCTKAIIDNNIKHVIIGTKDPTTLASGGVHTLTSAGITVEVGILEKECQALIADFITWQNTSRPYILLKLATTLDGKIATSTGHSKWISSEVSRQKVHKLRENVGKVGGAILIGGNTLKLDNPQLTCRNNNNNNKIQQPLAIIITSTLPEQQDIYLFNSRPTETIIYTTPQSGSTQQATTLRKKGVKIVTLKNWSPDLSAILTDITEHIRSTQGCLYMLCEGGGKLGSSLLKANLVDELHIYLSPKILGDNNALPIVNGRNPLTIHDAISLKIHTMELSGSDIHLTFRPEM

SEQ ID NO: 10403 - protein, 165 aa, Lawsonia intracellularis
MSRLSWSDYFMGIAHLVAERSTCLRKKVGAIAVKERRILATGYNGAPSKLPHASEVGCLRDQLGIPSGQRHEICRGLHAEQNIIIQAAIHAISLNNAEVYCTHQPCLICSKMLINCNITTIWYTIPYPDELAKKMLNEAGVELIQLTSKQNNSTFEFTSESSILC

SEQ ID NO: 10404 - protein, 412 aa, Lawsonia intracellularis
MDQIILQDPELAQAIILESGRQIDKLELIASENIASTAVREAQSTILTNKYAEGYPGKRYYGGCEYVDIAENLAIERAKALFHSEYANVQPHSGSQANMGAYFALIKPRDTILGMNLSHGGHLTHGSPVNFSGRLFNIVSYGVNKETGLIDYEEVAKLAEKHKPQLIVAGASAYPRIIDFSKFRSIADTIGAKLLVDMAHIAGLVATNLHPSPIPYAHITTTTTHKTLRGPRGGMILSTEDMGKVINSQIFPGIQGGPLMHVIAAKAVALGEASKASFVTYQKQVILNAKTLAKQLLDAGFNLVSGGTDNHLLLIDLTNKKITGKDAEKALDQAGITVNKNTVPFETLSPFVTSGIRIGTPALTTRGLCEQDMIKVANWIVTALNNINNETQLKEINKEVTYFARQFPLFSW

SEQ ID NO: 10405 - protein, 416 aa, Lawsonia intracellularis
MSQKRVVVTGLSAITPLGNNLKESWSKLLAGESGIAPITLFDASEYACKIAGEVKQFNPENYGILPKQSKRMDRFVQFAVASASELIKDSGLQITEANAYQVGIILGVGLGGLKTIEVFHEKLQEVGPNRISPFMIPMLISNMAPGQVAIFTGAKGSNFVVTSACASGTHAIGLAYSEIQLGRCIACITGGVESTITKLCISGFSALKALSTKYNDMPTQASRPFDKNRDGFVAGEGTGYLMLEELEHAKARGAKIYAEVIGFGTSDDASHMTAPGEDAEGMSFAMKQALKNAQIAPEKITHINAHGTSTFLNDMYETVAIKKTFGNHAYNIAICSNKSQIGHLLGAAGGIEAVFSVMSLYTGIVPGTINYTTPDPNCDLNYMPNGPQELNPQYVLSNSFGFGGTNASLILKKFEC

SEQ ID NO: 10406 - protein, 247 aa, Lawsonia intracellularis
MANLISTAIVTGGSRGIGKATALSLAKAGYQVFITYVSKSEEAESVIKQIQSQGGKAKMFNLDVSNADDITRFFNTEVKEQVNLSVLVNNAGITKDTLLLRMKNEDFDQVIDVNLRGAFICMREAAKIMTKQRYGRIINVTSVVGQSGNAGQVNYAAAKAGLIGITKSAAKELASRNITVNAVAPGFIATDMTATLSDDVQKAYQESIPLKRLGTPEDIAEAILFLVSPGAGYITGQILAVNGGMYC

SEQ ID NO: 10407 - protein, 334 aa, Lawsonia intracellularis
MNIPFTTNSLYIEGIGSYTPSTILTNEDLCQLVDTTNDWIVTRTGIKSRYILNDYENTSDAGYIAAKLALENAKITTDSISHLIVATCTPDFLCPNTACVISKKLGIVGPMAFDINAACSGFIYGLNIVQHIANDPTACILLIGSDALSKRVNWKDRSTCILFGDGAGALVLKGKKTLSTIAEVQDTVCYANGSYTSLLTVGGGTSKKYNLGDTIDDTFFIKMEGQEVFKHAVRNLTEVCTTILQKHDLSFKDIDLFIPHQANQRIIEAAASRLSIPHEKTFITLDKYGNTSAASIPLAIADAIKQQRIQSGMRVLLATFGGGFTWGAAILNFY

SEQ ID NO: 10408 - protein, 347 aa, Lawsonia intracellularis
MLNSHSITIAIDAMGGDYGPSVVVPGAVKAAQITGAKIILVGNTPEIEDQLALLQVKNTKIEIVHASDVANMDEKPSDILRRKKNSSIQIACRLVKEGLANGIVSAGHSGASVACGMFIIGRITGVERPALASILPTEKNPLILLDVGATVDCKPYHLFQFGLMGHTFACDLLNIQSPRVGILSIGEEEGKGNTQVKEAYELLKMAKDINFTGNVEGRDLFTGNVDVTICDGFVGNVALKLSEGLSSSLSRVLRKELFSSGIFSKIGTFLAKNAFKNFSKLIDYAEYGGAPLLGLKGIFIVSHGSSNEKAICNATKMAVLFEQKETNKRLIDSIGLNEELTRFGHSC

SEQ ID NO: 10409 - protein, 178 aa, Lawsonia intracellularis
MDSFWVKLDTSESKKFVLDSPSIWENSIKQFNMDCKLVQPFSGIITVTLQENGCMVDGSISGKIVMPCNRCTTDVLITIQHTFRDVEPLPTLNIDGKEVINKDINENIIRQSNGIIEVNLAEILWEEFVLSLPSKPLCNIDCNGLCYSCGKDLNKETCNCSKDEGDPRLAAFKNIVIK

SEQ ID NO: 10410 - protein, 363 aa, Lawsonia intracellularis
VKEIQQALLNWFYKNKRALPWRETYLPYHVWIAEVMMQQTQMDRGVEYFLRWIKQFPDIASVAYAPEEKLLSAWEGLGYYRRVRHLQSAAQVIMHKYNGTFPERYEDILELPGIGPYTAGAIASTAFNQDFPCIDGNVERVLSRIFDINTHIKKEPTKSKLYDLVKQLMPKKNARDFNQSVMELGALVCKKKPMCLICPVYSMCNSRINGTQLSRPVLAKKTPTTRLKMVTGILQCNQKIFIQQRLDNNIWGRLWEFPNGCIETGETPESAIIRNWNEQLGFSIQIENIITTIIHNYTHYHITLYCFDICFSQNITNTLSVVLPNPTRLSASSYRWVSQKELQTIPLPSPHRKLATLFFNTKK

SEQ ID NO: 10411 - protein, 168 aa, Lawsonia intracellularis
MANPIVLIETSFGDILVELFTEQAPVTVKNFLKYVNEGFYKNTIFHRVIDGFMIQGGGLNIKMEEKQTDAPIENEASNGLKNIRGTIAMARTSEPHSATSQFFINTIDNDFLDYQSPDEDGYGYCVFGKVIEGMNVVDKIQKTKTHQVGIHSDVPKDIVLITNISLFE

SEQ ID NO: 10412 - protein, 202 aa, Lawsonia intracellularis
MKKLIASFFTLSCILSFFFLKDVQSGELPKVLVKTNYGTFTIEVDTQKAPKTAGNFLFYVKSGFYNKTIFHRVIDGFMIQGGGFTENMEEKKPIKKPIQNEAANGLLNKKYTISMARTNDPHSATTQFFINVEDNKALNYKAPTPSGYGYTVFGQVISGQNIVDLIKQVPTHTVGMHNDVPIVPVIIESMVIIPAEEKTKDK

SEQ ID NO: 10413 - protein, 1073 aa, Lawsonia intracellularis
MNFREENIARSLIQGFIKGSIPDYIRDVGQSIIQNNGVQKLTIRKEHDIWYIDSIVQEEDFQNYSPQLIIFIEESRVSHTCNCHEAFMGVCKHIASVAIKLHNDLDKSTDLVEEPIKHNIEWRQSFRNFFSTSLEPEVGRHYLIFRFYPEPTRLIVAFFRGRQNKTGLSSVHQETTLEQILRNPDWCEQSPQLLKVAQQIGHFLDYYGHRVEIPEGLVSWFFWAIRHEYYLLWRDTNLPCTIVSTPLALKLKPSLDDEGLRFYVLLQREGKMPFSLTEEDTEITFHGQMPLWVNWNQSFYPVQTSLSPTLIKELVANTPIVPQDNISEFLDRVWTRLPSSELYEPEEFLKIMEPIFQPASYDPKLFLDEEGSLLTLEVQNTYETIHGEFTLPGPNPDFQTGSYIFEGHTFLIRRDQQEESALITQLSEMHFQPRSNKLWFMEPEEAIAFLLDSYPTLVENWRVYGEKALTRYKVRIAQPVITAKVESNEKEKWFNLDIDVEYDGQHLPLERIWKAWVRGKRYVQLKDGSYTSLPETWLQKLSHKLHALGFDPTKPPKHQFKQFEAPVLDTILDELPNSETDSFWNSLRNKIRSFKEITPIETPKGLNATLRSYQLQGVSYLNFLSEYGFGGILADEMGLGKTIQTLSFIQHMVNRKYEGPNLIVVPTSVLPNWEREAEKFVPDLKRLTIYGTRREGMFKKVVNSDLVITTYALLRRDLEELEKHYFNTIILDEAQNIKNPNTITAKSVRTIKARMRLCLSGTPIENNLFELWSLFEFLMPGFLGSQHAFQRGVIKPIRDGDNETLEYLRTRVKPFILRRTKSEVAKDLPPKIENITYCAMTDEQNELYTALTKKLRSQVLADIETKGIAKSQMSILDALLKLRQICCHPRLLKVDMPGFSIGSLASGKFEAFKDMIFDIVEGGHKVLVFSQFVQMLQLIKSWLQITDIPFCYLDGTSKDRLEQVDKFNNTPEIPVFLISLKAGGTGLNLTSADYVIHYDPWWNPAVESQATDRTHRIGQTRQVFSYKLICQNTVEEKILKLQEMKRGVAEAIIPGQDTWKSLTKEDLEMLFEI

SEQ ID NO: 10414 - protein, 552 aa, Lawsonia intracellularis
MDKIIHYKTKTLVHSIFFLLFLLTSLYLTIHFVYAQKLTEQNSDEDLSTEQPVHGGRIRLGTIAEPINLIPYLSTDGTSHEIADLLFVSALEYDKDLQVVPLAAKSYEVLNDGKLLRFIMREDVFWQDGVQLTVDDIEFTYKLMLEPNTPTAYAEDFLTIKEFKKTGRFTFEVYYEKPYARALMTWMGSILPKHILEGQDITKTPFARNPIGAGPYKLKSWETGSRLILEASDSYFKGKPYISEVIYTVIPDSSTMFLELRAGNLDMMGLTPQQYLKQTKGPQWEKNWKKYRYLAFSYAYLGFNLNKPMFQDILTRQGISHAIDRQAIVDNVLLGEGVVSFGPYKPGTWVYNTHLKPIEYNPEKARQLFTQAGWKDTGNGVLQRDGRPFTFTILVNQGNEQRARVASIIQSQLKEVGIEVQIRTVEWAAFLKEFIDKGRYDAVVLGWSITQDPDIYDVWHSSKAHEGGLNFMGYKNTELDALLVEARTELDQAKRKPLYDKIQEILHHDQPYCFLFVPYSLPIIKSKFHGIKPAPAGIMYNLDQWWIPKKLQ

SEQ ID NO: 10415 - protein, 731 aa, Lawsonia intracellularis
VIEAPTVGLPTPMQNVLRRLEANKATATERSLVQKAYVYAAAAHEGQLRLSGEPYLSHPLAVAEMLSEMGFDAYAIMAALLHDTVEDTKCSLEDIETEFGKQVADIVNGVTKISMMSFESKEEQQAENFRKMILAMSQDIRVPIVKLADRLHNMRTLNFQKPHKRQSIAQETMDIYAPLANRLGLHRIKLELEDLSFKYLHPDIYTQISTWMHSNRVVERNLIERIISKIKAILHKNGLKGTVQGRVKHVYSIHKKMVEQHLTLDSMHDILAFRVIVDTISDCYAVLGLLHSQWKPLHGRFKDYISMPKVNGYQSLHTTVMGPEGERIEIQIRTNEMHKLAEQGVASHWLYKERNHSVNLSDVPQFEWLREVLDRQKDEKDSLEFMQSLRLELFKDEVYVFTPAGDVKELPKGATPLDFAFLIHTEIGNHCVGSRVNGKLVPLYSVLKSGDTVEIITDKNRYPSRDWLKIVKTAKARNRIQQYLRTEEKAAAISLGRELLEKEGRKLGISLTKAEKEGHLISLATHLSLGSVDELLASVGYARNTPRYTLKRLQTLMSSDETSSYSKVIAPHKKKKESSVLQNFSGVTVRGIDNMLVRFAKCCNPVPGDSIVGFISRGRGVIVHTETCPNVQALESDRLVSVQWDGHETVPFPARIYLVGINVVGLLADIALVFKAENVNVESCIVQRLIDGRSEMDATIGVRDIAHLYQVIDKLRQLPNIVEVLRKTADE

SEQ ID NO: 10416 - protein, 135 aa, Lawsonia intracellularis
MNMFFFIMLFGLAILGEIIEYIAQSWGSKKYGSSTSGMWIGLLGAFIGAILGLPFLFGLGAFIGALAGAWIGCYFMEILNGRSREEASRAAKGALIGRLLGIIIKCGIGIIILVMTYHALFPTIVPSFTPPITNF

SEQ ID NO: 10417 - protein, 432 aa, Lawsonia intracellularis
MFWIDTSFSRSNSSDYFGANQRFTFQTTYEANENLKGVLRFRINNDWGVGKNENDYSYGGSIGTNGKSIGVRYAYIDWIVPNTSINVRMGLQQFAFPGFVADSAILDSNATGITVNTPINDTIGVTTWWIRPYEGKNKSTMDTVGLSIPCTYNGLSITPWGVYGRIGKNVFNLQKQFGQPDQLLFPFIWTPTGTQLLKEHANIWWLGFTGMYKFEIPFSIAWDFNYGNQSSNTKKFNRSGWYAALLAQYQFTGVTPGILGWYTTGDKDNLSNGSKRMPTYDSNWTGTSMGFDGYWQDRGTGASIAGNDPTGTWGIAGQLMDISFIEKLKHNLRLAWYQGTNNKEIAKQYALFAALPNSGLSRNGFLTPNGLYLTKKDSVLELNINSFYKIYENLMVGLELNWMHLKLDKKIWNSHDTKSNAYRFICTLRYTF

SEQ ID NO: 10418 - protein, 388 aa, Lawsonia intracellularis
GWKKRRQRMAATKRNKTKYPGVFFREEKRIGASGSEKVYYVVFKKNGKVIEEKVGRQFIDDMTPAKASRIRSELIEGKRKTKKLAKEEALAASLRKNIHGIWEEYAKGRPKNKNTDIDLCRYELHLKNIFGHKFPEEITTNDVRIFKDNLIQSGKSPQTVLNTLALLRRILRFGEKNGFCTLPDRSQLVFEMPKVDNIKTENLTETQLKALMEALDAETDQVMASCLRLALVTGMRKGALLALEWTDLDFEQGIITLQGKSAKKGKTAYIPMSEAAKIILEKLPHTSRYVFPNTKGEKRSDFRSMPNRIKQKAQLPADFRPFHGLRHTYASHLASSGKVDLYTLQKLLTHSSPQMTQRYAHLADEAMKRAARVADDILTSNMEKKDDD

SEQ ID NO: 10419 - protein, 336 aa, Lawsonia intracellularis
MTTDILQKALESSFNSFVKSEYIKRNFEYTSQEDAVWLKENWNLPLMELNYDFDDIFSILFLNDLITYFHQLINNFEYHSFITTVYEQDFKMIINKYQKWIKHVYNISCQYKLSFADLCHPFNIEEFIKNKIRDTQLHLPTFISTTTSTGFVGTSRIDGKWKFVVDFTKEDLNYEALLNLFKEQLAIEFAYLSKKITPHIENVLTEIVKEDNRTETYENSRLSRLYGLAQWDHRLKYIDTKGNNIGKFKCGLRKLNWPYCESECKSDNKYFICKNREACKKALKRQLQGTIQSIENKKSVAMIETGCTMPKNAKKIFERYSMPDVTKIYPLAYLHI

SEQ ID NO: 10420 - protein, 554 aa, Lawsonia intracellularis
MPYPQTFVSNTWNNASPDDLISYMEKQNHARSVISTSYKNYISDLKSKRVYDASERLRCTYYSLPEQNGPMNYFAPRTPVPYILGKVASDLACNTGFDQVGLYKMLLAYTLYATAGNWIIRCGSEWTEQAIINIIATAPSGHRKSVISAFCQEPFNIFEKNFNKLRGSDEGSGDLSHTKLKVAQRVAARITQKKIASSLVNLGSTPTDEDFEALVNEIAGEEQSRIAQFIEQPSLQFFTDNVTPAGFHRICYAQKGRLAIQSTEGGFLTRTSFLKGSLPEMLKNSFSGEGFTLQNFRSTYRYEHPFVALFILTQPEQLSRFLYKSSAFEGDGLWARIVFHLAQSSTPNGEFSLGEARKSYSDVISPIIQKEYNNSARHQIALSNEAYDMVKEYEKSLALDFQNGTPFMREALKKAHGLACRFAFAAHLWNQAEASSWPTTITADEMNLGVSLSKDSLAHFRFTIDPTCLRARIHARKLIDSLLCIDFNMQHDVLTHGITSRILQQRTGLKADEVRNALALLQQCNLLSALDFGGNQLVAALRPDFFQQPMGTFL

SEQ ID NO: 10421 - protein, 130 aa, Lawsonia intracellularis
LTMRSTFYRHNRYKTDLYAPVLIPSPHRLSASHGTSSARREDNESEAIPEPIRDAIPRKRTEGSPLPLRGLTLHILFPTHKSRQTFADSQSVRRPPSSTVRTITKFRISAAHKPPQDTLKVVITPKAPRR

SEQ ID NO: 10422 - protein, 181 aa, Lawsonia intracellularis
MNNKNYFHTINERIENLLINYISNHNKVLPVFFNVRYPQHYPYPQKKDISSLFDKVNTYYFRLGYDPYYFWKREQNISEHHHYHCLLFLNGNKIQRIMPVFKTVERFWASTLGIETALGLVHYCLKDWKGDLTGNGTMLRRDDPELSYKLDRFRMAASYLAKTATSGFVNDGYRNFGCSRI

SEQ ID NO: 10423 - protein, 164 aa, Lawsonia intracellularis
MVDIAHQLGLQSIDTIPLQFPSSDNGNTAIFKSTVTLKSGIVCSAIGDATPENVPPACRNAFIRMASTRATSRAIGLACNVGTLDFESETMNDQVIDVDYRDSSASSTVQTAHSKPVSQKQLEYIHSLSDNAEQIAMEKFSKDLNSLTTTEAHEVICECRAREK

SEQ ID NO: 10424 - protein, 639 aa, Lawsonia intracellularis
MNIINIGILAHVDAGKTTLTESLLYASGTISEPGSVEKGTTRTDTMFLERQRGITIQTAVTSFQWHSCKVNIVDTPGHMDFLAEVYRSLAVLDGAILVLSAKDGVQAQTRVLFHALRKLNIPTIIFINKIDQVGIDLESVYQSVRDKLSADIIIKQTVSLSSKITLTENTSAEVWDSVIENNDELLAKYIAGESISQKELAQEEQRRVQDASLLPVYHGSAKNGLGIQQLMDAVIGLFQSTKEQGSAALCGRVFKVEYTDCGQRLVYLRLYSGTLRLRDTVALAGREKLKITEMRIPSKGEIVRTDTAHKGEIVILPSDSLRLNDILGDKTQLPREMWSDVPFPMLRTTITPKTAEQRDRLLDALTQIADTDPLLHYEVDSTTHEIILSFLGRMQLEVVSALLTEKYKIETAVKEPTVIYLERPLKVASHTIHIEVPPNPFWASIGLSVTPLPLGSGVKYESRVSLGYLNQSFQNAVMDGIRYGLGQGLCGWNVTDCKICFEYGLYYSPVSTPADFRSLAPIVLEQALKKSGTQLLEPYLSFTLYAPQEYLSRAYHDAPKYCATIETAQIKKDEVVFTGEIPARCIQAYRTDLAFYTNGRSVCLTELKGYQATVGEPIIQPRRPNSRLDKVRHMFSKIP

SEQ ID NO: 10425 - protein, 304 aa, Lawsonia intracellularis
MKLPPFFVIIVRLPLFLTLHPISAPFRPVPAGKLPPVSCPPVPGLFQCSRNGSAVVARRRQHVGSGKKKQGGKSYERDIKTVIPGTGEPSVRTVYGSCERKAEYGQSYPLVGRIGQLIHATGLAGRGKPCRQIRTLFQKGPGSAKLFQTLLGRGRKLLHIPCLFRRSGLGKSSGCGFGHGLDMGKTPLNFGKHQIDMIFMLEGALHAFVLPVFHHEIGNGTEYPLAGKRAFAHGDAFVGPSNVGYGYIETTIHEKTVQIQSLLPDPAGTERKTGCSVFLQFSVIQADAAQPCRFEIQHPRLPKE

SEQ ID NO: 10426 - protein, 261 aa, Lawsonia intracellularis
MPEIFDASKFLEETMKKLLLLLSILFLTPSITLAEGNTFNDSFNKAKRILQDEVYYDHQVTLYCGYEYDDQKRICLPDGFIAEKHQKRSYKIEWEHSVPAENFGRAFTEWREGHPLCVDNKGKSFKGRKCAEKVNKTYRYMQSDMYNLFPAVGSVNAARSNKQYSELLGVQSAFGTCEAKIDGNRFEPPDRAKGQVARAALYMDKEYKEYNLSRQQRRLFEAWSNMYPVDEWECTRAKRIESIQGNENIFVKNMCIEKGLW

SEQ ID NO: 10427 - protein, 286 aa, Lawsonia intracellularis
VYRKGVMVNKRGQYKYYLSKSYKNRYILRQENNREKYRLTVCTSLFYYSGGIMTQSTDITKLSQAMLIVQQQLQPAIKDAKNPFIGNKYATLNSVMESCRSLLSSQGIWLTQLPCPAPVELGTGHIGLETRLIHAESGQWISSTAIIPLTKNDPQGMGSAITYARRYSLCAILGIVTEDDDGNAASITPKQAKTRIRPVEATQRQKVASDNSSSTNKILDTSNRPVSLHQNLPKIDGVSFRTVQADDGRMCIVASGRTLEKKELLRASGFKWDSQQKVWWKYDDAA

SEQ ID NO: 10428 - protein, 400 aa, Lawsonia intracellularis
MESDTRSQKLLEIITHGLDLYANRNTLTQLGNREEYIGMSDLGSYMTCPRMAVLNKLHPQNTTYALKPLLTMQRGHWFEDGIADALKTLELPLVRQLEIAVTHNGTPIKAHLDFVLASTHPRPTVRILEVKSCQKLPDCLYASYETQVYGQVGLLTRYWKEPVFSVREETGQYSFQDMTFPEIARNFWNLNLPYEWEGVDIEAWVLCLSMTDAKVFGPYVSDAGMMDAVLGKAEEFWSTIHQVKDGTLDASSLKTTSGFNPLCEHCLWNADCPKFKGNDHPEFSPELEELETWKSERASLDGKIKTRETSMKDWYANIFGTQDGWVQAGHWRFKASEIPGRRTLAKDSLAGELIELFHDGGMDDVDVPALLARHEKVSAPSTRLFIYKTRKQEKNDGLQV

SEQ ID NO: 10429 - protein, 124 aa, Lawsonia intracellularis
MGYRSDVGLALTQAAVQTLNEKMNALDKTSEAFAVITDFFAYADKHFEDTDSGSEVYLWEHLKWYEEFPDVGFIEHLLAELDWDDFLFIRIGEELEDIDTRGSFWDNPFDLGISRSIVISDPND

SEQ ID NO: 10430 - protein, 316 aa, Lawsonia intracellularis
MSHPVQLDAGQIFSGKSSGTMIFGYDAPSEYTPSIDPNYLFHESSRDVIVWFLMQNPEPLYICGPTSAGKSSLIRQIAARLNYPVFEATGHDRLEFPDLVGHLSVQNGNMVFEDGPLTLAMKIGGVFLFNEADLCSPATLAGLNTILDGSPLCIAENGGELVKPSPMFRFIVTANSNGNSDETGLYQGVMRQNIAFMDRFMLVEMGYPKAEVERDLLNRMFPEIPAEITEKMVDFANDVRRNFMGNSSAHDALDVTLSTRTLIRWARLTIAFQPLSKQGISPIMYALDRALGFRASTTSRAALHEMAQRIFPSISN

SEQ ID NO: 10431 - protein, 331 aa, Lawsonia intracellularis
MEKIMETPILNTPLQVLDNILALNLNITLWSARKKLTAEDFGGVELPPDDLASLGSKKICDPARLNVFTKLKARAFSLLDKHGVRFLSGWAIPDDKAGDIIQGLCEIRDEFFTEKQNFLNVYDAAIADWIARHPSWANIIENSTVSREYVESRMGFSWQLYRVSPAAGLESDLAMTESGLHEEVEGLGSTLFAEIAKDAAEIWKKVFEGKTEVTHKALSPLKTMRNKLAGLSFIDPNVEPAVSMIDTALGNMPKRGNLSGNALLTLQGLVCLLKDKEALIQQTQALLATPAEENVLDDLLQGFQQEAPVLNLPPEHSYIPSSPRLDSLGLW

SEQ ID NO: 10432 - protein, 530 aa, Lawsonia intracellularis
MSVTMKAMPLVASMLGNKLGVKVVIGSSDTACTNGDTIFLPPLPVDDEGVLYPLVSGFIDHEAAHIRHTDLGVLNGKRLTPVEKYLWNAIEDWRVEHEIIKRYPGCHEHFIWLIRHFFLKDTEEEKAGENDSPAFSVLNYVLLTLRSWDVPELVRNCELEANIMQKYWPGLRSSIDAIMRDIPARCRSTQDSLDFAQDILRLIEQEVQKEQKSTESPVVSPSITAQDNSEQTQQEPQTGGEEQPLQDLLQATEEEMPTSMGKQLSDMISGQCSPQQHKGMSVAVTGKLLTAELPDALIMEAQAISRALRTKLQGLLQSQILRRSSPSRHGKLCGHGLYRIAVHDPRLFMKTESVTGIDTAVHILLDISGSMTSCIELAGAACYSVALALAAIPGISVGVSAFPADYKEDVAATVYPLLRHGKRITNSFAAEAHGSTPMTEALWWVLGMLSTRPEHRKIVFVVTDGYPDDPETAKETIAVAKRMGIEVLGIGIDAPAIISMIPGSENITDIRELAPAMFRLLQQIMTEKGR

SEQ ID NO: 10433 - protein, 635 aa, Lawsonia intracellularis
LNQFTRNLILWGLISLAMVIVFNLFSQPQSSLQERMTYSEFLNQAQKGKIADVIIQGDIIKGKTTEGKSFQLYAPSDPQLVSKLIEQHVDVRAEPIEDSPWYMTLLVSWFPMLLLIGVWVFFMRQMQGGAGRAMSFGRSRARMLNQEQGRVTFEDVAGVDEAKEELSEVVDFLSNPRKFTRLGGRIPKGVLLVGPPGTGKTLLARAVAGEAGVPFFSISGSDFVEMFVGVGASRVRDLFIQGKKNAPCLIFIDEIDAVGRQRGAGLGGGHDEREQTLNQLLVEMDGFESNEGVILIAATNRPDVLDPALLRPGRFDRQVVVPTPDVKGRLKILEVHTRRTPLDKDVNLEVIARGTPGFSGAALENLVNEAALQAARDDKNLIDMKDFEYAKDKVLMGKERRSLILSDEEKKITAYHEGGHALVARLLPKTDPVHKVTIIPRGRALGVTMQLPEADRHSYSKEYLLNNLMVLLAGRAAEEIIFDTITTGAGNDIERATNMARKMVCEWGMSELIGPLSIGERGEEVFIGREWAHSRNFSEDTARIVDSEVKKLIEEAREKCQELLTNNLDTLHALATALLERETLTGDDIDLLIKGEELPPFIPENSNTEIKKEDSNTETFILDADEQNPSPPKTE

SEQ ID NO: 10434 - protein, 295 aa, Lawsonia intracellularis
VVWIKHMKSSQIISYDNHWIVKGGRQINPTPFCIIGILNITPDSFSDGGRYLITKDVIEHTKQMLQSGAQVIDIGAESTRPFAEPIIEEVEKERLIPHFKILKEQFPDVIFSIDTYKAFTAKAALELGADIINDVSGCTFEPNLLDILVEYKPGFVLCHTQGKPKTMQVNPSYKDIIEELLYFFESQMSLITKAGLPEDRIVLDPGICFGKKKEHTEIIMKNIERLKVLGRPLYIGLSRKSFFKQFFDLDVHERDEATRIATALLAARGVRYHRVHDVAGCTQALKITEVFTPFL

SEQ ID NO: 10435 - protein, 246 aa, Lawsonia intracellularis
MDFIPFSWRDLLDITLVTILIYRVILLVKGTRALSALSGLLLLILIYLGAQYLGLYTLGWLLENLFGSLFLVIIILFHDDIRQALSRVGVHNFWKKKKEIAPSLIDNIIWACQHFAKRRIGALIVFEREIPLTDMMQEGVMLDSILSKELLLTLFYPMTALHDGAVIIRRGRIAAAGCILPLAQMDRQAFGTRHRAALGVTEVSDAFVIVVSEERGEISMVSRGKLVVVSDIEQLIESLRDVLDYK

SEQ ID NO: 10436 - protein, 240 aa, Lawsonia intracellularis
MLRLFSGRELSYTINLSGVTQGVNTIPLSSIQFPELRAYQIIDVIPPRMVLQVDHVKEVELPVTLQLRSSLFSDAAYLEDVHIIPSHVKVRGASNIVSSMNTVIAEVSALLDDEGRVVQDDAPLIAPQFVEVSPPTVNVCFKLGMQRRSISLQRTVLLPEEKERLTTRPERVTIVVSVPQSLLNDPKYISQVHASVDTSILEDSLGKDFDGVKRPIKVFLPAAARLIKVSPDIVTVFRRK

SEQ ID NO: 10437 - protein, 451 aa, Lawsonia intracellularis
VGKKLFGTDGLRGRVNIYPMTPEVALRLGLAAGTYYRRKSHRSRVVIGKDTRISGYIFENALTAGLLASGMDVFLVGPLPTPAVSFLTANMRADFGVVISASHNPFYDNGIKLFDADGFKIPDKAEHKISEMILDQSHTWDYPDPSSVGRAHKIKDALGRYIVYLKNTFPSTLSLEGLRIVLDCANGANYKVAPLALEELGAELIKIGTDPNGLNINHQCGSLFPEYVAKKVIEMRADIGLALDGDADRLIVVDEKGIILNGDQIMALCAQDLMRQNKLPGNILVATVMSNMALEVFMKEKKGALIRSNVGDRYVMEAMRKHGAMFGGEQSGHLIFREYSNTGDGLLAALQILRIMKQYERPLSSLAGLLQLFPQRLINVNVKQKRPIETMPTLLKTIQRIETAFSGRGRVLLRYSGTEPLCRVMVEGESDSKVNTYAEELADIVAKSLAE

SEQ ID NO: 10438 - protein, 306 aa, Lawsonia intracellularis
LYLLTNNIFTIGALMNIRKVVVPVAGWGTRSLPASKNIPKEMLPIYNKPVVQYVVEEAMLAGVQDVIFVTNRDKSVIEDFFDYNPQLESILERSGKYELLKVIQNVAEMVNIMSVRQKRQLGLGHAVLCAKEIVRDEPFAVMVGDDLMFGENAGMDRLIQIAREQNKPVIGVREVPEDKINRYGIISGTEISTDVYDITEMIEKPTLGSTQSRLAIVGRYLLTPDIFEYLEKVTPGHGGEIQLTDALAALAQEKGMLAVKLGGLRFDAGDWVDYLSANVYFAMMDETLKDDLFNKLNQILHISEKQ

SEQ ID NO: 10439 - protein, 792 aa, Lawsonia intracellularis
MNEYCTITLLSPPYSLLTYTLPSWLPYTLWKPGLRVAILLGKEMLRTGIILSLHTQKPELPHNVVLRPILWALEKIPIFSYEYIKMIQELALRHSIPSGKIFASILPMGLRTTHVQMKCTYKNVLTNLQLKELKHKTEEELHDIGTKWISEENNDWLTSQTESMIVSEECILTVDPPWPIRPSATRQRVILDFLFTNGVVSKKELLQKLGKEYRTALTSLTRYGIISIKQEILTDKDELANTIALLPPLIPFGYTLTEEQKEVVTLLKKELQKNQAKTFLLFGITGSGKTAIYLEIIQECIRNNQSVLVLAPEVALALKLQHEIKTVFPIIPCYLSHGYQSSQQKEDLFRKIVKNQVAKVIIGTRSALFLPLTNIGSIILDEEHDASFKQGERLIYHAKEIAWFRAVQSNALLLLGSATPDIKTFHAVENNKISIVKLHSRVGGGVLPTIKLIDSQQLESKDVTFARESLTTLKETLEVGEQAVILLNRRGYAPIIYCITCRKSIRCPSCDVGMSYHKIQESLICHYCGKSIRFPCPCPFCKGTQFLPMGQGTEKVEEEIRAILPSDSMVLRLDYDTTRRPGRTEEILKTFAQGKSQVLIGTQMLSKGHHFPNVTLVIVVNADIGLNIPDYRAAEKTFQLLTQSAGRAGRGEKAGQVLIQTHDTSHYCWKFIQQHDYLGFYKYEIALRQKWLYPPFINLALIRLSYPIEWKEGKIWIKKVQSLLQEWANKLNVSVRGPALSPIPILRGRNRFQCLLKSNNWQHIRTIFYKIQTTALPQKLRVVLDIDPIDML

SEQ ID NO: 10440 - protein, 215 aa, Lawsonia intracellularis
LKFITDFKKLDVLAHQAVTSALSTYQYHLPIFIDATAGNGYDTCFLAQLAGTQGIVLAFDIQQEAITNTYQRLISLHLEQQVTLIKSGHERLYAETLNFFQKNTHLVEFYHFNNQIDICSGVMFNLGFLPKSDKKIVTQPTTTIMALNNALNVLAPGGIITIHCYTGHLGGVEESEAVLYWSEQLSLNKWDITIYKQIFKQKNNEQLVLIKRKQL

SEQ ID NO: 10441 - protein, 537 aa, Lawsonia intracellularis
MNSFSQPWIFYLCASIAIGYALGRLNYKGASLGSAAILFVGIAFGKMGASIPQDIGGIGLLIFLYAIGTDAGPSFLSALKGKGLQFSMVALCFTITAVITVVISGSWFDIDPAGMAGIYAGAMVSSPALAGILDSVSPYQSVIITTAYSLLYPVGILASILYTQWIIAFDKSDTRKAEEELHQKSLFENPPIHIGCFEVYPRSVSSVREIHNLFNVRITHIIPAGRKVVAPASALLKICPGDKIRLLGSENALKRVETFLHAKIANDTDFKEHIHHYQLVVTKKEACGSRIMHLAAKCHMDTLMFEHVHRNEIDIPLTPRTRLYMGDILHLSGDPRQIETLRRLLGDDPRQLQIADVMPVMLVISLGWLLGNIPIPLYEGKTFMVSSSAGVLLTAIFLSNIKKLGSIDFYLPSSSLLLLRETGLALFFAATGVHTGASLNMGIILQSGNILLCGLITTILPMIVTWYFIKFVLHMNYLYAIGSFAGARATASSFAIATAITKTPYVAAVYSIVFPVVTLLQIMSSKVVYTLGSLYLF

SEQ ID NO: 10442 - protein, 235 aa, Lawsonia intracellularis
MRYINYYYYYYYFLFFFIIITQTICFAHNTDGSSILDHSITITTKEMQVSVHYPEIHSSKIDQDIKGWAQQLVENFKTTNSEKELAIGPYELRADYSITKPSDKAISIIYTITDFTGGAHGNLEISVFNYDLTTEQPLDLIDIFDDVNSALKIMSEYSYKSLSETLGNMSDKEILSVGTAPDLDNYNSIALIPNGIRIFFQPYQVAPWSAGPQQVDMTLEELSKANPTKKIWNLS

SEQ ID NO: 10443 - protein, 198 aa, Lawsonia intracellularis
MIIDLIWIITSYVIGSIPFGVLFANIFCGIDPRTLGSGNVGATNITRICGRKLGFITLFFDVLKGFFPVVIATYLSESPFMYTMTGLAAIIGHLYSCFLHFKGGKAVATSIGVLIPIAFWQLLFAAILCTFFIWRSGFVSLGSLVLVTSLPIILFITGKFAYIPLSLIIMALIFWSHKQNIQRLIKGEEKVWKHSESI

SEQ ID NO: 10444 - protein, 673 aa, Lawsonia intracellularis
MQDKEPQLAWVLEEFQNKFKILLPNRKEINIQSSRILPWIGPNYRNIESKDIAIAHIEQHKFKRKELESSFNSYELWEIAQGEIIQAPAKWFSELVTTSPDIDTIAACAHVLLKDNIHFKFQSPNFEIYSKEIVDIRVKEQEKTIKQQAFITDSIPFFRYLWELYTQKKVYSINTANVYTQFEEQLRQIIMEQISNPEKADSQLWKKLVTGLPDDPFLALYLAQAWGILQPHHNIWFERIDYDPTDNWQQPFQNTIDMLCKQSSLYTTSTLPLPFISIDSETTKDKDDAFFIEPIDNGWKVVVALACPALNWPFDDPLDQAVRKRATSIYLPEASYNMLPNVLGIDKYSLHAQCTRPVLIITCIVGYDGVVKSCTPSFESVSLAANLTYHECEYILEDNYSEDSPYAEQLKLAFHVAQTYQKYRLKHGAVIVERSEPYLSLIVEENETKVVLTEEFATPKSHLLVSEIMILINAAIAHWSYENNISLFYRTQDIIIPDQYKGIWKEPHDIAKVVKVLAPSVLDVVPKKHAGIGEKYYAPSTSPLRRYPDMVNQAQILHVLQHEKYKWSLKELEIMLPYITSRLEYTNQIQRFRQRYWKLVYILQQDKNTWWPAIVTEVTEHYIVVNLPREQLTLRARRKLFTAVPEIGQSIYIRIGNIQPLHNEIHILEIQQV

SEQ ID NO: 10445 - protein, 424 aa, Lawsonia intracellularis
MGLLKDMYHKVVEEHFPPTITISFGDKILTYTKKTWNINGEIKGLRYGDNPDQPAALYEFTSGELTIGDTIWRTSGGIISSLTDAELIQSGKHPGKTNLTDIDNGCNILQYLASRPAAVILKHNNPCGVAWSKKSIGNALEKAFWCDRIAAFGGAIVVNRPLDHDSANLIFKHYFEVIAAPDYEPGVLELLTTKKNLRILKLPGLNSLDQLTHSHYLDIKSLCDGGLILQESFLNRVRSTASFLPATATSKDGVTISAKQPTDEQIEDLLFAWSVEAGVSSNSVIFAHDGATVAIGTGEQDRVGCIELAIFKAYAKYADKLTYQNYGLSLYELREQAANDKTSLEKLEKIKKETNDVCGGLKGSVMVSDGFFPFRDGVDLCINQGVTAIAQPGGSLNDYEVIKAVNESSPQVAMVFTGQRSFKH

SEQ ID NO: 10446 - protein, 107 aa, Lawsonia intracellularis
MEQLLIKLARQLESLDEASLMALWEKYANIVSQFEPTKRWEEATLIFSLIQAKHMKNQLFNYNWAEQVRPSTSSHEVPISVMLETKNKPHEVKQAKIIPFKKLIEKS

SEQ ID NO: 10447 - protein, 428 aa, Lawsonia intracellularis
MPNVVIIGAQWGDEGKGKIVDLLTRDTDYVVRFQGGNNAGHTVIVDGKTYILHLIPSGILHKEKICIIGNGVVLDPQIFIQELDTLLSQGIDVSPNRLKLSTKTHLIMPYHKLLDQVRENASTTQKIGTTGRGIGPCYEDKVSRIGIRTIDLTQPKLLYKKIELALKEKNTLFTQLYNTEFVNAETIFNEVMETASRILPYLSDTSSILQDAFIKNKKVIFEGAQGVHLDIDHGTYPFVTSSNTIAANASIGSGIALSSTEKIIGIVKAYTTRVGSGPFPTELYDNTGKFLQEKGHEYGATTGRPRRCGWQDLVMLKDSVRLNGFTELALTKLDVLSGLKKINICTSYAYQGESVTYPPQDEHILFNEIKPIYETMPGWEHSLESCTSWNQLPQCAKNYIERIEQVVGVPITIISVGADRNQTLFRDI

SEQ ID NO: 10448 - protein, 352 aa, Lawsonia intracellularis
MNVAVAVSGGTDSLYTLATLREAFGNHHVFALHARFKEQITNDPVPALKEQCHNLNVPLHVVDLHKEFNELIIRPFIKAYADGKTPNPCVHCNAKVKFGLLQKKAQELGANQIATGHYVSLIDHDLYGKALKCGADSTKDQSYFLALTPREQLQTAIFPLGTLRKTEVRERLQKMGLEVPLPKESQEICFVPNDDYRKFLQSSDVDLLSEGRMVMLDGTLVGKHKGLWKYTEGQRRGLGVSWSEPLYVAHKNHSCNELVLGTAKDILVDTCTAQDINFLVPQDNWPKELFVRTRYRQQAVPADIQFVTNTSSSKKITIHFHSPQLPAAPGQLAAIFDKSGYVLAGGLITNDL

SEQ ID NO: 10449 - protein, 394 aa, Lawsonia intracellularis
MIGISKLYCGQVESSDALRYGRHSGKLPSHLLQFSADKKPVVVWNTTRRCNLKCVHCYATALDEEKGADPMSTEQGKALIDDLAAYGAPVLLLSGGEPLVRNDLVELAAYATSQGMRAVISTNGTLITKEKARELKHVNLSYVGISLDGAEEVHNKFRGVPNTFKKTLEGIENCKAEGLKVGLRFTINKRNVADLPIIFDLLRDLEIPRVCFYHLVYSGRGSDLIQEDLSHEETRATIDLIMEKTRKLFEEGYPKEVLTVDNHADGPYVWMRLQKEDPKRAADVFELLQYNEGNSSGRGFACISWDGKVHADQFWRHHTFGNVLERPFSEIWDDPNIELLHKMKNKKEHVKGRCSTCRFLNICGGNFRARAEAYYGDVWAPDPACYLTDDEIKK

SEQ ID NO: 10450 - protein, 332 aa, Lawsonia intracellularis
MNTIFFRGRRLRRSIQVRDLIQETRLHSQDLIMPYFVVDTDNSNFFQPIPSMPNQYQLSLSNLEKKVDEAINHGLKSVILFGLPKKKDSYATEAYNENGIIQQAIRTLKKKWPSLHVITDVCLCEYTNHGHCGLLKVEDQCGHVKNDPTLELLTKVAISHAEAGADMIAPSDMMDGRIQALRSGLDHAGFIDIPIMSYSAKYASAYYGPFREAAQSAPQVGDRKSYQMDPANTNEALREVQADISEGADIIMVKPAGPYQDIIRRMYETFPVPIAAYQVSGEYALIKAAGEKGWINEQAVIMESLIGIRRSGAKLIITYFTEDVLKKRWVDS

SEQ ID NO: 10451 - protein, 437 aa, Lawsonia intracellularis
VGRFMSLQAEKISLEGHLSRGKDMYKGHPHEQLMGKTSDGSGHPHVNGAHPKSAHPGGMPRTLPDGSPTCKLIAWEVTRSCNLACKHCRAEAHMDPYPGEFSTEEAKALIDTFPEVGNPIIIFTGGEPMMRADVYELMAYATSKGLRCVMSPNGTLITPETAHAIKKSGVQRCSISLDGYNAESHDSFRMVPGAFEASLRGIQYLKDEGVEFQINTTVTKSNLNDFKKIFKLCDELGASAWHIFLLVPMGRAAEIAEQSITAEEYEEVLHWFYDFRKTTSMHLKATCAPHYYRIMRQRAHEEGVPVNVDTFGMDAMTRGCLGGTGFCFISYEGQVQPCGYLTMDCGNVRETPFPEIWKKAKTFQQFRTQSEYKGKCGVCEYHKSCGGCRARAWSMDGDHMGEEPLCTYQPKRYLKQKNSSQPIDHQGITPCARGHMG

SEQ ID NO: 10452 - protein, 150 aa, Lawsonia intracellularis
MDNIDKKLLDIIQTGFPIVPRPYAEIGEKLGITEAEALSRVRALKGKKIIRRLGANFQSSKLGFRSTLCAAKVPDEKMELFTTEVNKLPGVTHNYIRDHVYNVWFTLIGPSWEEVCSTLDGVTERTGIKILNLPATRMYKIRVDFRMDDE

SEQ ID NO: 10453 - protein, 329 aa, Lawsonia intracellularis
MHYPFKNIIHLFITLVISVCIGCTSYKISEKYPYIDGAVIEYSNNVGNNAKAEKIDNGMFIPDGKGGSIWIPGSNPQGPNEAFIQAQELRLKVRELASQLLDTQDSSSLIGLIALPTSFVNLNNFSESSPLGRYMSEAMIYEFNQRGFPIKEYRIDTKISMSESVGGEFSLQRNLPALSVKQQWAAILVGTYLRENNAVFINVRLVRAKDGMVLRTAQIVLPQNALLSNMISPPLSSGILYIGPQENNTSISKFNPTSSSQQEQQLVKPSVKTQLAQDTQEMNNQLEQKDNNNNNNNNKITKQIQSNSLEESSSKATISPPVPGMPNNL

SEQ ID NO: 10454 - protein, 204 aa, Lawsonia intracellularis
LNILHMLSGVIIMFRLLFIFIFSITFLLPNKVLATTSGTIPTAAVTISEQLDAQLLRRIGNNLYNKSSISIVVTPAVLLEDLSKSSPLARQLAEEITKCLVQNGYSVTEIRKASKIIIDKTGPKILTQDPSQLATTQVEAVAILTGTYTVTKKNVRFNIKLLHIPTNDVLATASTTIPITKEIYPLLVDKNTKPGTPSVTTKLQ

SEQ ID NO: 10455 - protein, 190 aa, Lawsonia intracellularis
MIKGTQAYVEAQFNTTGQGEVLLLLYDGAIKFLNQAKEKILEKDFGAKGILISKALDVISELESSLNMNLGGEIAENLHNLYVLCTTRLLQANLKLDIKLIDSVIDVLAGLRSAYAEILNTPEAKAAAAEIASKLSVSQQSSGSPVPITRTQHPTGASKSLAQSAYKTQQITGTQAQVAAQHKAQEELNK

SEQ ID NO: 10456 - protein, 694 aa, Lawsonia intracellularis
MADYLSGGISFGGIGSGTDFQAMIDQLKKIELIPKNRLVVSHEQWTKKYKAFEELIKTVKDTEASLSKLSSVGAILKKEGSVSNTSVASVKASSDASDGTHTIDVKQLATNTILSNNHIFDSKTESINNTGSPGIFAYEYKGELHEVEVPPGSDLEYLATLINKDSNNPGVKANLIKTGDGYMFSLEGTETGANATLSISNKTTLPDFKASVATSSALANGEDTIINTSGTTQQFSFEYNGRTFTFDIPSGTTAKELQTAINENTKNTGVRATFEKHGSDIVLQLEGTVPNQQVKVTASPTDLGSFTSSGQAGWNKRDSQDAIFNINGWDQELTSSTNELTEVIPGLQITLLSEGKTQITIQTSTDEVKKQVEKAVESINNVLSKIQELTKATAEDKDDSKDTSSSSSKIPSYLQSPTKVKAGLFTGDTGIQMLSTRLKSIFSSNGLGFSPKQTQDGPGDLFSSLASIGIVVDADEGSETFGQLKILDRETIGPDAPYTTLDEALKKDPQAVADILAGSSGISDSTDFSYQDHIVGKTQAGTYDVKYSVDASGTIGDVYIGGVKASLSDPAKNIYTVTSGPATGLSIAVNNRTPGINVESTVRVKQGKLSQIQEALKAEVQQDPLKENTGPLIIMQDNYKDVMKNLETRIEKETQRVTSWERMMRLKFSRLDAVLAKYNQMMSANASSLGQLGA

SEQ ID NO: 10457 - protein, 642 aa, Lawsonia intracellularis
MQSDINKNHLTMTEGLTYINESGLKEEESKNIVGYNINGSIIDLFTPLPTITKEVIPITIDSEDGLEMLRHSAAHILAAAVKNLFPTVKISIGPSIENGFYYDFDAERPFTPEDFPAIEAEMQRIINESIPFERIEISKAEALEFFSSLHENYKVEIINSLEDGNITLYRIGNFTDLCKGPHVPNTNFIKAFKLLSVAGAYWRGNENNQMLSRIYATAFPNKKLLKTYLTQLEEAKRRDHRKLGKELNLFEFHEDIAPGMVFWQPNGMLLRTILEDFLRKEHLKRGYQLVQGPQLLRRELWEKSGHYTNYKENMYFTEIEEDVYGIKPMNCVSHMLLYKTHLHSYRELPQRYFELGVVHRHEKSGVLHGLLRVRQFTQDDAHIICMPEQLEEEIIQVITFVRDLMSLFDFNYHIVISTRPEKSIGSDYAWELATSALIQAVEKINLPYSINHGDGAFYGPKIDIKVTDAIGREWQLSTIQCDFTLPERFELEYVGQDGKRHQPVMIHRAIFGSIERFIGILTEHYAGAFPTWLTPIQVKILTVTDAQTPFAKHVYSQLQDVGIRVGLDIRNEKLGFKIREAQLAKIPYILVIGQKELELESVNVRLRTGENIGMQSVTEFIKLVENDCIQPFKRGGMNYRFS

SEQ ID NO: 10458 - protein, 158 aa, Lawsonia intracellularis
VRVIGPDGEQLGILDRNQAIAIAKEHGLDLVEVAATADPPVCRIMDYGKFKYEAQKKKQEAKKRQTIVQIKEIKIRPKTDEHDFETKVRHIKRFLEEGDRVKVTVFFRGREIVHKDRGIVILERIILETKEVGKVEQEPKAEGRTLQMLLAPLPKKAV

SEQ ID NO: 10459 - protein, 117 aa, Lawsonia intracellularis
MRVKRGFSAHRRHKKYLEMAKGFRGGRSRLYRTAREAVERSLVYAYIGRKQRKREFRKLWILRINAGAREHGLSYSKMMAGLSQAGIMLNRKILAELAVKQKEDFAKLVEIAKNQVH

SEQ ID NO: 10460 - protein, 345 aa, Lawsonia intracellularis
MDLIKEFERLIPEIKKNLEQASSLEHIEQIRVAFLGRKGQLAALMSKIPSVDTSLRPVVGETANSVKNQLTQLIHEYKTQLDFLTTTNRIQNFDAGLPGKRPWYGTLHPITIVLEEICSVFTSLGYTIATGPEVETEYHNFEALGIPSEHPARDMQDTFYISDSILLRTHTSSIQIRTMLKKQPPIAIIAPGRVYRRDSDVTHTPMFHQIEGLVVDKNISMSHLRGTLTAFLKTIFGAEIKIRFRPSFFPFTEPSAEMDISCHPCNNTGYVKNEICRICKGSGWIEILGCGMVHPKVFESVGYDHNIYSGFAFGLGVERIAMLKYHIEDLRIFFENDLRFLRQFM

SEQ ID NO: 10461 - protein, 803 aa, Lawsonia intracellularis
MLLSLNWLREFVPYEGTAQELGNRLTMLGFELEDIITPYNNIQSIIVGKVVHCEKHPEADKLSICTIDIGQETLLHVLCGAPNVATGQKVPVATIGTTMPDGTIIKKIKLRGIESFGMICSEKELEFTDDHSGILVLPEELTVGTSLVNALNLDTEILKISITPNRGDCLSILGLAREISTAFGLPLFPQQPIHFLEVEPDFSKNWSVHVSSKKVCSSYLLRLVENISVQKSPLHIRHRLHSMGIRPISNVVDITNYILLELGQPLHAFDKDLIEGNTTYISLAKEEEILCTLDGKNHTLTPSDLIIYDDTKPIALAGIMGCQNSKVTEATKNILIESAVFNPSIIRKTARRLGISTESSYRFERGVDSSGAMYALNKAIKMIIDTSGGEVKIGNAHYEPTPYKQPIIQLDTSNIQKVTGTSIPSNFCINTLTQLGFEIDTSNCNIWDITIPSWRKDIQHSVDLIEELLRFYGLNTIPEELPCIYKSLNDIGLPESQYQFITKVKHWACGIGLNETENYSFIGNNELDLLKFSNNTRLIIYNPLTEEQNVLRTSLIPSLLNNVKYNVAHGNTGLRLFEVANTYTFEAISETTAKEVLKLGIVMHGDLFDTGWPQPSTSASYLDLLGIVEHFITFLHLPPLTTSQTDTYAFLNPGVDLFIHGKKIGYIGCISQHIAKNCHTHKEIWITELDLETLAHLYKNIKITFKPLPIYPSSYRDMTLIITSNTSISNIKSYMDLIDIPILENIFLLDIFRPNNIEQHCTFRFVFRSAKKTLKDSEIDLAYKKITEILSNQCNIRFNVLLE

SEQ ID NO: 10462 - protein, 138 aa, Lawsonia intracellularis
MNERLYKIGEAARILELESYILRYWETEFSQLSPKRTPKGQRLYSETDIKLLFRLKYLLHEQGLTIEGARRVLSGDSALLITPQTKNKNETKSIKNETTIFKEKEEMEKLLDTIKTVEKELLYIKQLLNKSSTFSLSC

SEQ ID NO: 10463 - protein, 155 aa, Lawsonia intracellularis
MISSPERYISNFHTAGANLLVVHVEATIHLQRVVSEIHRLGMKAGVALNPSTSLSVLEYILDDIDLVLLMSVNPGFGGQHFLSSTYEKIYNLRRMIDEREKTILIQVDGGVTLSNTKALLDAGTDVFVCGSSFFVGESYSEKRYQFESVANSLTI

SEQ ID NO: 10464 - protein, 655 aa, Lawsonia intracellularis
LRILTIDAVEKANSGHPGAPMGMADIAESLWRCFLKHNPSNPQWINRDRFILSNGHASMLLYGVLHLSGYDLSIDDIQNFRQLHSKTPGHPEYKCTPGVEVTTGPLGQGLAVAVGMAMAERLLATTFNREHFPIIDHYTYVFVGDGCLMEGISQEACSFAGTHHLGKLIVFYDNNGISIDGKVNKWFTDDTPARFNACGWHVIPNIDGHNAEAIDSAIILAKSITDKPTLICCNTIIGYGSPNKSNSQSSHGAPLGKSECDAVRTELHWKSEPFQIPEQIYKAWDCRKKGTMLENEWNELYSKYCSTYPELSSELERRIQHILPECWNSLTTSYLQEIEQNKIAIATRVASKNTLDIIAPCLPELIGGSADLSGSVGTIHSHTKYICNLSYDGNYLSYGVREFLMGSIMNGIALHGGFIPYGGTFLVFSDYAKAAIRLSAMMNQHVIWLLSHDSIGVGEDGPTHQPIEHISSLRLIPNLNVWRPCDAVETTIAWEKSIESQKTSCITLSRQPLTYQSRTKEQISNIQYGGYILYEPTKSPELILIATGSEVELAITSAIQLEKEGYAIRVVSMPCTSIFDSQPKEYKELVLPSTIRKRIAIEAAITDYWWKYVGFDGDVVGIDTFGESAPAQILFSHFGFTKEHIISKAKNLLQK

SEQ ID NO: 10465 - protein, 374 aa, Lawsonia intracellularis
MIMMLDPIVRSLNYISEQSQGHGRIIMLSASGKPFTQKFAHELAKEKTLTIICGRYEGIDYRLSELFPIESIRVGEAVINGGEAAAMMLIEATSRLLPGFIGKETSYTEESFSNNLLEYPQYTRPELYESISVPKVLLEGNHQKIKQWQRKQSLKVTFNTCPEMLNKANLSTSDMEFFCNNIKELARLNLGRNLHCVLLHYPVMLGDQTIGATSLTNLDVHDIARCAKTYGLGSVTIVTPLQDQQNILEKIITHWTVGAGGKSNPDRAEAFKLVNIASDLQSSLDTIENYTGQSPLLIGTTACKYGVLLPCDVKEMLLQQPIALLFGTGHGLTPDTLNSCFGVLRPLRWIDNYNHLPVRSAVAITLDRILGDFY

SEQ ID NO: 10466 - protein, 115 aa, Lawsonia intracellularis
MDIFKKIEREQMRLDIPSFKSGDTIKVYFRIVEGEKERIQVFQGNVIRIHRGTTNATITVRKISDGVGVERIVPLHSPLVDHIEVVSEGRVRRSRLYYLRNLRGNAARIKPKKIY

SEQ ID NO: 10467 - protein, 224 aa, Lawsonia intracellularis
VFQKKLKQQQIVVKQSLPITPHELVYDNLSLLTAGLDEVGRGCLAGPVVAGAVILPDTISIDGLADSKTISSNRRYILAKKIYETAISWGIGVVWPKEIDEINILQASLKAMAHAATVLKTFPELLLIDGNKAIPQKFFIQFGWNFLPIQHSIIKGDASIPAISAASIIAKTFRDTLMSKLDKRYPQYNFSKNKGYGSKTHREILQKIGPSPIHRMTFKGVTSH

SEQ ID NO: 10468 - protein, 132 aa, Lawsonia intracellularis
MKSCEIGQQGESAAALFLYNKGMSILERNWRKGRFEIDLVCQDIKTLVFVEVRTRKAKGMLLPEQTLTISKRCNIIHSAQLYLMDKKDWSMPCRFDVICIISKKTTLELEHYKNVFEFYEIMDSSNTSWQPW

SEQ ID NO: 10469 - protein, 276 aa, Lawsonia intracellularis
MSLNSTKLWIVATPLGNPGDLSIRAKSVLESVDIVLAEDTRRAGLLCQHCNIVVKKFLSFHDHNEEKKLKPLLTMLSSGKTLALISDAGMPIISDPGYCLVNACRKASIPVSVVPGPSAPITALVGSGIIPHPFTFLGFLPRDFIEQEKIFSSFIMLSHTLVFFERKNRLINTLKNAYTVLGNREVCIARELTKLHEEFLFFNLGEEVTFKNLLGELTVIISPPKEKHITEHSILYKIITEEKKYGGTAREVAKRVQTRTMGWTTKQIYSIITSRS

SEQ ID NO: 10470 - protein, 155 aa, Lawsonia intracellularis
MSAKKNSHLVFENRKARHLYDLLDFLEAGIVLTGPEVKSLRSGHASFQDSYVDFKQGEGYIVGLHIPPYNNAGYVIQNPDRPRKLLLHRQELKMLASKVEQKGLTIVPLKLYFKNRKVKTEIALAKGRKLYDHRNELKKRAEAMDIKRELAARHL

SEQ ID NO: 10471 - protein, 560 aa, Lawsonia intracellularis
MSSEAEKIIYSMIHVSKRHGQREVLKDISLSYFYGAKIGVLGLNGSGKSSLLKILAGVDQSFEGETVLSPGYTIGYLEQEPLIDETRTVREVVEEGVQELVNLIKEFESINAKFAEPMEPEEMDALIEKQGKVQELMDAKGAWDLDSKLEMAMDALRCPPGDTPVSVLSGGERRRVALCRLLLQLPDILLLDEPTNHLDAESVAWLEHFLQTFPGTVIAVTHDRYFLDNVAGWILELDRGKGIPWKGNYSSWLEQKEKRLAKEAKAEKERIKTLARELEWIRMSPKGRQSKSKARIHAYEAMLNHESEKRAPDLEIYIPPGPRLGKTVIEARGTTKSFGDRLLIEDAHFIIPSGAIVGIIGPNGAGKTTLFKMIAGLEKPDTGEFLIGDTVVLSYVDQNRESLLPGKTVYDIISGGQEVIRLGNRDINARAYCSRFNFIGSDQQKSVDVLSGGERNRVHLANMLKSGANVILLDEPTNDLDVNTMRALEDGLENFAGCVLVISHDRWFLDRLATHILAFEGDSKVSFFEGNYSDYEEDKKKRLGKAMEQPHRIKFRKLTR

SEQ ID NO: 10472 - protein, 306 aa, Lawsonia intracellularis
MGRDIAESSKEMMSLWEKAESISKLPLRAVYWESNDTTLMSDTQYLQPALTVVNMSIWQQLSKHLVPGCVAGHSLGEFSALAAAKVLSFESVLELVCLRGELMSNLEPSEQGAMIAILRLSQTEVECIVKDVSHNIQQSITIANYNTPVQFVVSGTREAIEATISFVKEKRGRAVLLPVSGAFHSPLMEKASQKFSEKLSKMNWSTPLYPIYTNSTGTPFVDTKSIYDSILNQMISPVHWINVITNQWKDGTRQWIEVGPKGVLSRMVTPILEEHISTIDNNISVHSIDSLKTLTCFTSNNSLTLT

SEQ ID NO: 10473 - protein, 345 aa, Lawsonia intracellularis
MYICFATVILSWRKMMSSIETLERNLAFDLVRVTEAAAISAARWLGRGDKNAGDKAAVDAMRLSFNNLPMIGTIIIGEGEKDEAPMLYNSEQVGLGYGYPLDIAVDPVEGTNLLAFGRPNAIAVVGAAPAGSMYDPGPSFYMQKLVVSQSAKNVIDLDAPVETNLKNIAKALGKDIKDLTVFVLDKPRHKQLITDIRTAGARIQLHTDGDVAGALLAVDPRSEIDLMIGTGGTPEGVLSACAIKGIGGGMIARLDPQTETEKQSLYNAGIDLSKLLEVDDLVKADDVFFAATGISGGSFLHGVQFHGQGATTHSIAIRSKTGTVRHIQSSHNWEKLMKISSIGYN

SEQ ID NO: 10474 - protein, 550 aa, Lawsonia intracellularis
MRAEQYLKTCLECTIKKLGYTWPKKAVIEIPQNTLHGDLATNIALVLANNIGINPKNIAEKIAEKLQQESTSFSSVSVAGPGFLNITFSPTFWQKTINHILSKGSSYGSCQLGNKQKVLIEYVSANPTGPLHIGHGRGAAIGDTLARLLRFTGYNVTTEYYINDAGRQMQLLGLSIWLRIKELSGIQVTWPEEYYKGTYIIEIAKALLEEQPDIISYTDIDGEQASFHFGMNVILNGIKQDLKTFKVEHEEWFSERTLIKTNAIEQTLKALECTGLTFEKEGALWFQSTVFGDDKDRVLRKSDKSLTYFALDIAYHYTKYNRGFDRIIDILGADHHGYIARIKAAMQAFGHDPMTFDIILIQLVSLLENGIQVAMSTRAGQFEKLIDVINEVGVDAARFMFLLRKSDAHLDFDLELVKQRTMNNPVYYVQYAYARICSIIRKAHDLGFTITDVNEVPLSNITTKDELNLLRLLDKFEDVIYNAAQHLAPHYITHYLMELAGELHSYYAKYPVLQSNEKTIVLSRLALLQAVGQVIYNALNILGVTAPKNM

SEQ ID NO: 10475 - protein, 258 aa, Lawsonia intracellularis
MSYKPISKKIVRPKKYSSHTTPTCFSFSISIPGLCVILFISIMALSWSFVFGILIGRGYSPNHNLSEINQLINDTSSENQIEKQPILKPENLRFMHELKQDNNPTLYNKEEKKIHNLSQEIDTNLQHSQIPSSHPHQDLKQKKDISSETKNIQKNINTKEQVQQITSQNDLMIYSFVFQVASFKKKIQAENLREKLEEEGFRTQLVTTNDEKGNIRWYHVRVLLRGVISDAIIAKDTFTQLKLKDTKIISQEPTGRHR

SEQ ID NO: 10476 - protein, 266 aa, Lawsonia intracellularis
MLMVFNQLVILLGQWTISICITLGEIFLFLLEGFRQIFITPKLCSKAIRQIYVIGTKSLFVISLIGLFTGMVLGLQGYYVLIKFGSVGFLGSAVSLTLIRELGPVLTAIMIIARAGSSMTAEIGVMRITDQIDALEVMDIPGIGYLVSPRIVASLISFPLLTAVFDVIGIIGGYLTGVCLLGVNEGAYFSSIESSTTLSDINEGSIKALTFAILVILICCYKGYNAHRRRDGRGPEAVANATTSAVVVSCVLVLIADYVVTSAMLR

SEQ ID NO: 10477 - protein, 276 aa, Lawsonia intracellularis
MPHIRTAWDIRLEHLYLGYENKAILHNINTVIPGGKITFVLGESGCGKSTLLRHIIGLAKPISGKILYGGQDLFSLPTKQFRSIRRRFGVLFQDGALLGALTLAENVGLPLSENTNLPPTIIRETVIRTLSLVGLEKFADFFPNELSGGMKKRGGLARAIVTEPPILFCDEPTSGLDPINSAQMDQLLIGMKTQYPEMTLLVVSHDLASVSRIAEHILFIKDGAIIFSGSYPELKSSKDPYLQRFIDRKPEKESIRVEASPINPAVRVALNAWLEE

SEQ ID NO: 10478 - protein, 147 aa, Lawsonia intracellularis
MVISKEAAVGFFVLIGLICLGYLTIKLGKMELFNSDGYSVFATFTSVSGLKPGAEVDIAGVKVGRVKSIRLDNKLPRAIVELNVNNNIHLTDDAIASVKTSGLIGDKYISISPGGTGEPLKNGDEIMDTESSVDLESLISKYIFGKV

SEQ ID NO: 10479 - protein, 216 aa, Lawsonia intracellularis
MSIQKTFFNFIFFFLILLIFSNQAVATGPTKTIETSVNDVINYLKDPSYSNPQTHLQVRNKIENEVRKVFDFSEFSLRTVGLNWNSFTTSQQERFNNAFSDLLLATYLDKIDGYNGEKVTYTNELISSKGDRAEVQTVINLSDGRTIPVVYRMMSKKNTWVVYDVIIENISLIKNYRAQFQDILMKNKPEELIQKVEARAKELHNAASVGNSKLGQ

SEQ ID NO: 10480 - protein, 298 aa, Lawsonia intracellularis
MFSQQLRTYDFIIFIIIIMIIIHFFCLPAHAKHLPPIENKSSQSQELQSKPGCKPSTSSKIKLSDSDFEDYGIFEDYDELCDKPIKDPLEPWNRFWFYFNDFFYLRITKPLYKGYEVITPESFRQGFKNVLYNLQTPIRLFNSLLQGKIGQAWIELGKFMVNSTIGFGGFINITQKDKPLIPIDPDTADFGHTLAIWGFGEGIYLIWPILGPSTIRDTFGTIGDAAVGPFAWFVKPIGIVPLEYGLTTELFLTFNKVNTVIDSYESITKSAIEPYVALRDAYVKYRRLNNGCICRVQP

SEQ ID NO: 10481 - protein, 893 aa, Lawsonia intracellularis
MNESSHRITPMLEQYLSIKSNYPDTLLFYRMGDFYELFFEDAETAARELQIALTARNPRAENPVPMCGVPWHAADSYIHQLIQKGYKVALCEQTEDFRESKGLVQRKVTRVFTSATTTEETSLDPKTHTYLGAMYWDEEVNIGAFCWADVSTGLWTGIQVKKKSELWQWIQKILPKELLFPEKYELPATAKLIEIQFVPLPYKTHFEYPQAVKRLLQAQGVADLEALGLEKHTILVQACGALVAYLEQTQLQDVNHLMPFKPLDIGKYVILDEITEKNLELFKRVNGKKGVGTLIHVLDHTLTPMGGRLLEERLHHPWRDITTILENQSVLEWLILYKENMKKLQDALKAIYDLERLSTRIVLNRTSPKDLLALKNTLLILPRVKDALIVEINVKDNRYITIDESILSTMPTILRQLLTKWDNISDYAEKLDKALDENPPNSIVEGGLFKLGFNAELDELMDLLEHGESKLQALLEKEQKVNNLPRLKIGFNRVFGYYFELTKSAGTPPSHFVRRQTLANAERYTTEELKDLEERLLSATEKRNTLEYKLFQKLREELVSIRPRILFMASLIAQLDLWQSLADVAIRHNWNKPTLLTNNNIFIREGRHPVIESIIGKSVFVPNDLVMDETRRMLLITGPNMAGKSTVLRQTAIICLLAHMGSFVPATEAQIGICDRIFSRVGASDNLARGQSTFMVEMMETARILRQATSRSLVILDEIGRGTSTFDGLALAWAVAEDLVCKDHDGVRTLFATHYHELTALEEKLTGVHTMTIAIRHWNDELVFLYRLIPGPADRSYGIEVARLAGVPQSVIQRAKIILTQLEQTHQQPRSLLNLLPGVVQNANEELSKQDVKVVEHPVVTLLKEMNPETLTPLDALKSLVEWKLLYGTTHAT

SEQ ID NO: 10482 - protein, 166 aa, Lawsonia intracellularis
MHIMQPLWAPWRSEYISRKKEDKCVFCISDISVSDDEKYLILYRGINTFVMMNKFPYINGHVLIAPLRHISEFELLTDEESYELMFLLKQCTRILREKFCPQGVNIGLNLGEAAGAGICDHLHFHVLPRWVGDSSFMAVLSETKIISEHITSTYNKLKPLFSTISL

SEQ ID NO: 10483 - protein, 557 aa, Lawsonia intracellularis
MFDYSLDTILIFHNQTKQCIGYIDNITVSKAISYGLGDQPVKEFMNSNIITATPTTSIEELFTIFTETQQPIIPIIENNIVATTIDKVRLLRLSQIDKSNLFEETSIDEHLCYLDMLTLLQSNLSTTLFKLLSEVGKLGDFLHVNVYVVGGVVRDILLNNLSIVEKTDIDIVVEGESLSFAEALAKKLKGVVGYTHNNLMTANVRYPFTSEKECSIDIATARLEYYAMPGALPLVEPTSIEQDLFRRDITINAMALQLNQKYFGRLIDHFHGQKAIQNKSIDVIHSLSFIEDPTRIIRAIRFEQRYQFRISQQTEKYMHYALKCNVIEKIFGQRLLHEFEMIFKENKPDACIIRMDELGVLTAIDKRFSLTSKQKTLFYNISNILQWYHSLNLTENQPDIMIIYLTAMCSSLSQEQIIALLQKIGVESAYQKKIALTLSMAQDMDSTLCCLLHEKKIEKEGPVSTIFTLLSKLTLEVLLFLQAFSYSSSVTYFISQYISLWRFIKPYITGNDLKKLGLVPGPQYKVILEDVLKQKLDGNVHTKEDELDYLCLRYNLS

SEQ ID NO: 10484 - protein, 306 aa, Lawsonia intracellularis
MDTIFSSQLAWKWLDKLISERGLSHNTIQAYKQDIDVFYLFFQDAGCNFNSIDDEYIMLFIIWLRKRGDSSRTLARRLSSIRNFFHWCVEEDILLSNPALLIDGPKLPSLLPNILSQDEMLRLLTTPDITNKLGFRDKVILELLYASGIRVSELIGVHVLDFDQDKGIIKVFGKGGKERYIPLHSSAMKLLIHYVQKIRPMFTPIEKFLFLNRSGKGLTRQAIWKIIKRYALLASINKSISPHTFRHTFATHLLEGGADLRSVQLLLGHVDMSATELYTHVQSDRLKYIHSMFHPRSNYVSSEITT

SEQ ID NO: 10485 - protein, 183 aa, Lawsonia intracellularis
LLKCMKKILKINSNMTNYKTSYISLGTNLGNLDDNLKEARIRLNTNNKIILNRISPVYNTEAQDNCNQPWFKNQIIQLATIDLTPHELLDILLNIETSMGRIRSNDPEQRYGPRCIDLDLLLYEQETYNDKKLCLPHPRMLQRAFVLVPLYDINPALAFPNGQTLKEALKNISYRVEDNFIYQ

SEQ ID NO: 10486 - protein, 676 aa, Lawsonia intracellularis
MSNLLFTIKTQYKPQGDQPEAIKQIVSNIQSGVKDQVLLGVTGSGKTFTMANVIAQCNRPALILAPNKTLAAQLYNEFKELFPYNAVEYFVSYYDYYQPEAYVPSSDVYIEKDSSINDDIDKLRHAATHALLTRRDVIIIASVSCIYGLGSPEYYARLIIPVEKGQQINMDEIITRLVDIQYQRNDMDFHRATFRVRGDVLEIIPAYEHERALRLEFFGNEIEEIREIDPLTGEVLGNVGKTVIYPASHYVSDRDNLIRAMTDIQKELCERLYDFQATNKLVEAQRLEQKTQLDLEMIQEFGYCNGIENYSRHLDGRKPGDPPSTLLDYFPKDFLFFIDESHIAIPQVGGMFKGDRSRKQTLVDFGFRLPSALDNRPLEFHEFLTRLNQVIYVSATPGPWELDRSQGIITEQIIRPTGLLDPEIEVRPIKGQIESLLEECYQRVNSHERVLITTLTKRMAEDLTDYLNNMSINTRYLHSDIDTLERMAIIKSLRTGEFDVLVGINLLREGLDIPEVSLVAILDADKEGFLRSTGSLIQTFGRAARNVSGKVILFADTMTKSMKAAIDETRRRRALQQEWNTKHNITPKTIQKSVVTPFDMISANTSSKKGCRKNKHSMDTKELFVITDKTSPEDITKYIKQLEYEMKEAAKELEFEKAAVLRDRIKVTREQFLLMS

SEQ ID NO: 10487 - protein, 682 aa, Lawsonia intracellularis
VSINSPQYSLPSKKEKQRVRELRKFINHHNYLYYTLDDPEISDSEYDKAFQELLTLENTFPSLKTNNSPTQKVGNNILKKLEEQPHRQRMYSLDNVFSNDEWEGFLKRLANALPEVPFSFWCDPKMDGLALELIYEKGQLTSALTRGDGDIGEVVTEAVRTISNIPKRLKHSINAPELLEIRGEVVISRADFKKLNKEQEKKKKKLFANPRNAASGSVRQLDPTITASRPLRFLAYGIGEIQPSSLKWNTYHELMSYLKEYGFETPPKGKLCISSTEVQSYYTRLQAQRYSLRYEIDGIVMKLDDIQSQEKLGYTSRAPRFAIAWKFPATQVQTRLLQIHIQVGRTGVLTPVAELEPINVGGATISRATLHNEDEIKNKDIRPGDMVIVQRAGDVIPEIVSPILSDRSAKSKPFVFPKICPVCHEKVYRINNEVAWRCINLSCPAIRLQSIIYFVSKSGLNIQGIGQRLIELLVTSGCIKTPADLFTLTTADLLTYKRMGAKLAAKTIQALSLAKQTMSLHRLICALGIRHVGEQTARILASSFIDLDALSSASLEDLQQLSEIGPEVASSIQAFFKNKANIQMINQFREMNIWPIQQVNDTTTKGFFTGKKLLFTGTLERPRAEMKRLAEEAGAIVMTGISHKLDYVIAGKNPGSKLNKAQELHISILDEPTFLQKLLIVL

SEQ ID NO: 10488 - protein, 258 aa, Lawsonia intracellularis
MDLSIIVIGASGRMGKTIIQVAQEQGIIIDAVIDRPTRLTSLASYNIASDSEPDKIFSRYPQAVVIDFTTPETSISMAQVAQKYGNPIIIGTTGFTLEQFDTLETLAKTSRIFWSPNMSIGINVLLKTLPQMAQILGNEYNIEIVEVHHNKKKDAPSGTAMRIAETLSTSRHWDLEKVACYNREGIVGERPQEQIGIQTIRGGDVVGVHTIYFIGPGERIEITHQADSRKNFAQGALKAAEWIIKQKAGRLYTMMDII

SEQ ID NO: 10489 - protein, 525 aa, Lawsonia intracellularis
MNTNIALLQLHTITGDIIANTQNILQQVSKAKKDGATVCITPELSLCGHPDLHEIPTIISTCINSLQQIAKECNGGPSIIVGSIETTPTNIYNTTFLIQNGQIHTLCKKPFTQFYPSIKKEEYILINNNNNNGFCFTSINKQLFLIVTGYKTLINYVCNKIIYQNEQLKKVEAILCPSSEPFIASQIPHFFYELTSISDQLNKPLYFCNQAGEDKNYIFLGGSQCINSQETKNNQSLLFQENYIVVKNHSSVSLKDMSFNSNKLLWEALIHGIQQYVKKNGFSDVVLGLSGGIDSSIVAALAVEALGEHRVHGILMPSPWSSEGSITDAELLANNLDVKTYLLPIHTLIDSFTHSLSELFIGYPPDVTEENIQSRIRGVLLMAISNKFGWMVLSTGNKSERAVGYCTLYGDTCGGLAPIGDLYKTEVYHLAQWYNQSKQKDIIPTSVLTKPPSAELRPGQLDQDSLPPYKELDFILQMLLSKNPTNIDQELLNNPKLNDIKRLIQKNAFKRMQGPPSLVISNFPL

SEQ ID NO: 10490 - protein, 226 aa, Lawsonia intracellularis
MEIPVVRNVLEVNSKLAAMLKKQFAEHNILTLNIISSPGAGKTSLLERTLSDLSSEFRMAVIEGDLQTDNDAKRVAATGVKAVQINTDGGCHLDSNMIMEALTSLNLNEIDILFIENVGNLVCPAEFDCGEDAIVAVLGVTEGDDKPEKYPLLFHRAGVLILNKIDLLPYVNFSIEKATQHARKLNEPLEIISLSCRTGEGLQVWYDWLRDSLRKKRSIISNKTES

SEQ ID NO: 10491 - protein, 118 aa, Lawsonia intracellularis
MHEMSLVTGILSIIQEEMSKNGVNKLQRVKVCYGELTNIVPDSLQFAFKIFTEGTSLEGAILEIEKIPLMLRCSNCLSLFTPEDKQKIFFITCPSCKKEVAYNVETGREFYIQHLEVE

SEQ ID NO: 10492 - protein, 255 aa, Lawsonia intracellularis
VTKGTFLGVYASYSNKTATNTKKALKHYWFVWEDSNGYLVQLLDNTYQPIAEPQTLPLEIFKKNFINQPHILAAPITSLHPSSKNNTEKTITKYHKQYKTTLNTSQVTKNNFNVKKDMIIEQSEQVKHIDTQLRSEFTTALERWNSGDKLAPLKTFEGLSNVQEGIVPEHKHMFTDFGVNLRKNSLPKLAILHFKRAVELSPEDAHAHFNLARICYELGNLNEAEQHLERALSISPNLNVAIKFLGFIHDQKKYS

SEQ ID NO: 10493 - protein, 216 aa, Lawsonia intracellularis
MLILACLAALEFIQDFPNSYQEDGQMVTGIISKIIGSNCDNSSTSDINNKKSIDRDKDTLLSSSNRNTIQAGTPHQENNIKEDLQLTNKNEQTTPEEEEESKFIWLTEAPSELKKGEKAITQTRLSIGKDISFRITADDAIKAQSMMLKNPDRFVLDLQGKWGISLPPIPPTNPWLKKIRLGTNNGNTRLVFDLQKKPSKTEIKQLDTNKIEIQIH

SEQ ID NO: 10494 - protein, 527 aa, Lawsonia intracellularis
MMFEYLRIQNLALIDDIELEFSSGMNVITGETGAGKSFILKAINFLMGDKLRVDMVRQGKERAQIEALFVHPEKGELILRRELSAATGRSRFYLNDKLTSQNTVKELQPKLLTHTSQHGQQKLLQPLYQEKIIDAWVEHPELFQQKDILIEEIKTLLKKKEKLIYRCQEIEERRDLFESYLYDINKVKPIPNEDEQLELLKEDIRSIAILQKKQLMILQLLQGEEGGLINHLSLIEKNLECFLSIDQSIMDSLPTIIECRQQLNELAQKLQKLSLVTSEKNKNIEEIEARLFELSQLKRKLHRSLPEIFSFKEEIEDKLSFLDSCVLDLRQIEKQYTILIKKLQVILEKIYELRKKAANKFCHALKAQLIDLGFSDYLNVIIDFIPYELFSGCVEHKAQILWAPNPGQPPQLLERIASGGELSRFLLAVVSIQSSEDEGMLIFDEIDAGIGGHTLFKVADKLVSLADKKQLLVITHWPQLAVKASRHFLIVKDINENITFTRCKQLTDFEKQAELSRMAGLSLSKLD

SEQ ID NO: 10495 - protein, 272 aa, Lawsonia intracellularis
MRFVQQHIILLIGLIIVLFMVVIAVFAPLLAPYDPTELHLNAVLEPPSNTFLLGTDALGRDVLSRLLYGARASLGVGFIAVGIAVVIGVFFGLIAGYFGGITDEIIMRVVDTMLCFPSFFLILAVIAFLEPSLTNIMIIIGLTSWMGVARLVRAETLSLRERDFIAAAKLCGASTTRILLIHILPNTLTPVFISATLGIAGAILVESSLSFLGLGVQPPDPSWGNMLMEGKDTLEIAPWLSFYPGLAILITILGYNLLGEGLRDTFDPRLAR

SEQ ID NO: 10496 - protein, 334 aa, Lawsonia intracellularis
MYQSTKSLILYFIKKILWILVVLWGITIVSFIVIHLAPGSPTDLQTTLNPMAGETTKQRLESLYGINRPIYVQYIDWLSRIIRFDFGTSMSADARPVIVKIFERLPLTVFMNVLSLAISLMIAIPLGVLSAWKQDSLFDKLITILVFLGFAMPGFWLALLLMLWFGLDLQWFPISGITSLDFSYLSLWGKIKDVASHLVLPIIVMTVGSIAGISRFMRASMLEVLRQDFILTAKAKGLSTWKVIFRHALRNALLPVITLLGLSVPGLIGGSVIIESIFALPGLGQLFYTAVMARDYPLIMGNLVLGAILTLLGNFLADVCYGIADPRIRQGAIR

SEQ ID NO: 10497 - protein, 173 aa, Lawsonia intracellularis
MSEQYLGQGIDILLGQEFLTWLWFISETKPMGFKDSKGQLFTFSMEQRVVVQGGEGESLETATVFGPYSPLREARIGLQTGKKVTRALLRFEKDELSWQLTLKAENFSFGNFQTPKVSLDSDEPDAVFLEKIYLIETCLHFIDICYKNFLHVRLSSEWEIEKKELISWIFKSE

SEQ ID NO: 10498 - protein, 204 aa, Lawsonia intracellularis
MGFLRSSCSFTRYKIIEKVSSELWQKIPEKLQQYAFQDIDDTSQERSWGWTNFDDMLDVNWNISHPEKGEYLAFALRLETRRIPPAVLKKHLAIALQKEKKNLQLTGKKFLSQERKSELHEQVRLRLFKHFLPIPAVFDVVWSTTTNIVYLSSTHIKLIDLFTTFFTLTFDLHLELQTPYNLAVSLLDTSSIIQIDTLEPTKFV

SEQ ID NO: 10499 - protein, 375 aa, Lawsonia intracellularis
MRYHYSLSVILTILLTFSMVTSTLAIPRTEKDLQYIANNLTETPVKYGDIPSITQPEYISVNDANLTLEGRDPVFIVFIPGSQPRIYPQRIMVWHEVVNEYINGKSYVITYSPISGSMAAYESTIEGMNLIFDTEGKLFNSTSVLIDRNTGSLWSQLIGMAFDGPLKGKGLRYIVSWWTTWDKAKEMYPTALVLATPRGTNKPYGRDPYGSYVTHGNYYDDERIVYPVVQQDKKHQLHPKTKVLGIEIEGLPLAIDEAYVKEKKVVNFYFGPYALVALYDSRLDIVRVFNREVWDKQILFTQNPQGLLVDIDTNTIWNYDGIAIQGKLKDASISEFFGINAFWFSWYAFNPESLLVPGSTVVPSSALIKNALFLE

SEQ ID NO: 10500 - protein, 181 aa, Lawsonia intracellularis
MFTFQQIFHSFIFSHIIALIDSSSVLIPTSKITIFDHTKWHLYETSTHCIKKYRKISSLIKNNDSIELKEYQSIKRNLILFLFSFSQTAPEIHSELVDTLKTFSYAILVDYRVPERNLDIPSFVINYGLFFCTAKKGFSFFQTFIKKNAIEGIIYTYSLNSILRKTICAGSITILCIQNIK

SEQ ID NO: 10501 - protein, 263 aa, Lawsonia intracellularis
MDTRKITVHNLDIASHKAYFESFVNQYITVDSHYLLKLKYEHTQHVLDNVKMILQYEEFSNIVSRGALLAALYHDIGRFPQFIKWRTFNDWESINHATLSVQLLKKYGFLEEEIKIIQKVCLSAMVLHNRKLLPKQLDNKIQLTATILRDADKLDILRVVSSHMDGTSQKKEVTLFLKDEPLKWNHKVMQDILEGRTPSYLDLIYLNDFKMVILSWIRELTFPITKRLFASSSSISVLLDTLPNCNTFQNIRNLFTKMIEESL

SEQ ID NO: 10502 - protein, 1169 aa, Lawsonia intracellularis
MSNFVHLHCHSEYSLLDGAIRLDALCARTKEFGMPAAAVTDHGNLFAATHFYSICKEYGIKPIIGCEVYVTKDHADKLSKFSKARHHLILLARNKEGYHNLVKLVTRGYLDGFHYKPRVDKTLLKQFSSGITALSACLAGELPRTIMGKNIFVEKGGTFDDAISIAQEYASIYPGQFYLEVQANMLPEQQKVNEKLYELAEYTNLPLVATNDCHYLNADDVEAHDILLCVQTQAKFNDTDRMRFNATDLYYKSSEEMEKAFSHLPIAIENTIKIAESCSVEMDFSKNLFPVYELPKGVTPDDEFRRLAREGLQKRLEVYPNKKQLTTENYWKRLEQELDIICKMGFPGYFLIVQDFINWAKDNNIPVGPGRGSATGSLVAWALRITNIDPLPYNLLFERFLNIERISLPDIDVDFCEDKRGDVIRYVMNKYGVNSVAQITTFGKMKAKAVVRDIGRVLDMSFKETDNIAKLIPDDLHMTILKAMEVEPKLQALYNEEPHIKRLLDISMKLEGLVRHASTHAAGVVVSDKPMDEYLPLYRGKKGELVTQFDMKMVEKVGLVKFDFLGLRTMTLIHTTLKTIKDQGKIPPNLDTLPLDDPKTYELLSKGDTDGVFQVESSGMRQYLRMLKPNCFEDLIAMLALYRPGPLGSGMVDEFIKRKHGTVTIEYPLPSLKDCLKDTYGVIVYQEQVMQIAQIVAGYSLGEADLLRRAMGKKNPEAMAKERTRFVEGAIKNNVTESIASDIFDLMEKFAEYGFNKSHSAAYALISYHTAYLKAHFTLEFMAALLTSESGNQNKILKYTAACKDMGIDILKPDIQTSCREFIVKDNSIVFGLCAIKNVGDDAIEKIITTRKKDGPFLSLLDMSFRVNLKKVTRRVLESLVKGGACDSFGCSRAGMLTALDKIIARTYKKIKDEQSNQGSLLAFAPKIESVSLPGIGFTCEEQNMPEWDEDEKLLYEKEALGFFLTSHPLQTYRQEIYRLGLQPLEEVREMNDKITIKSAIIVNNIREILNKRGNRMAFVRVEDLTASAEVTFFSEELQKSRELLSSNQPLLLTATIDSRESTQNDTIDESDDTQLRSIKLRAISVESLSSACQNSELPISYYVDKNRLTTSGIEELKAILDKHKGQTEVHLIFSLDNINCQVRLGSSWNVSPSPAFQQDMYRWSIASE

SEQ ID NO: 10503 - protein, 126 aa, Lawsonia intracellularis
MSKPTWHLTVRSEFCAAHALRHYKGKCERLHGHNYGIKIIVGGHELTSDTELLIDFTELKAILKDVLEPLDHRYLNNIPPFDQINPSAENLARYIWQNVKKRLPPNVYMVQATVAERNVQSATYME

SEQ ID NO: 10504 - protein, 82 aa, Lawsonia intracellularis
MPLYDFICIQCGHPFEEVTHFESISLSCPNCSSQNTQRILSAANIKRVTISDSDCKSHFSPNSIGGCGREGCGSRDFPCGAN

SEQ ID NO: 10505 - protein, 749 aa, Lawsonia intracellularis
MKDEQKEEKDKIIYTSTMKEKKRRHRLYEFLLAFALILLILGGTWTQLAFYGVDSWIFIVLLNINSIFMLIVLFLVTRSIVKLIMERRRKVFGAQLRTRLVLIFVSLSLIPTVIMFLASNKVVATSVDYWFTKKAESSLQAALDVGQSFYVAAAQRLRTHSESILTTIKKDKLIWGGSGIDTLLQDKQQEYGLTFIGIINPQGIEQHWYGQEGTLSIWKKIRERIDWNHVASNNFSSLLWATDHADYVFGVLAIDNGRSGYLITAESIGQGLLTKLDRISNGFEEYTSLKQLKKPLKISFLLILGILSMIIIFGSVWFGFRLSKEITAPILALADGTTRIAQGELDVRLIDEGQDELGLLIKSFNRMAKDLQQGQTNLKKANELLAEQKDTLEERNKYIETVLDNITTGVITLDVFGYILIANKAACSIFNTSQHFLKGRCPANFLPPQYKNIFYSMINQLQKHPDLHWKTQENFILGDRQWKLVIHAVAITGIDGIQAYVVVIEDITELEKMQRMAAWREVARRIAHEIKNPLTPIKLSGQRLDKKFGSQIQDPVFQQCTELIVKQVERLQDMVQEFSSFAKLPEVKLSSGDIRPVITELLELFIHNHNEIKWNVYIPNTLPEILMDASALHRALLNVITNAVEALEYSQNIEKKCIEITITHDHTKGIISIKIEDSGIGLAPNERERIFDPYFSRKKGGTGLGLAIVKAIIDDHKGTIKVFGSYLGGLNIEIELPIVTSHVDFTQSI

SEQ ID NO: 10506 - protein, 502 aa, Lawsonia intracellularis
MATARKAVVKKMPVGHGTKRGSMGNRTQKSSMSNGVVRHELLDDVFAEDDLSQTLPKYQMPLYEHRPRDIYQAVHDELMLDGNARQNLATFCQTWVDPEIHKLMDECVAKNMIDKDEYPQTAELEMRCVNMLADLWNSPDPTNTIGCSAIGSSEAAMLGGMALKWRWRAQRKKAGKSTDKPNLVCGPVQICWHKFARYWDIELREIPMEKNRLIMSPEEAIKRCDENTIGVVPTLGVTYTGQYEPVEEVSNALDALQKKKGWDIPIHVDAASGGFLAPFIEPELVWDFRLPRVKSINSSGHKFGLAPLGMGWVVWREKTDLPEDLIFWVNYLGSNIPTFAINFSRPGGQIVCQYYNLLRLGREGYRRIHQACYDTTDYLANELTKTGIFKILYGGKTGIPALTWTLKDEKKYPFSLYDLSDRLRTRGWQVPAYSMPANRTDLVVMRVLVRHGFDHDLADLLVNDIHRAIEHLKQNPRRKPLGSGQVTSYDHSGRSSIPQKKK

SEQ ID NO: 10507 - protein, 485 aa, Lawsonia intracellularis
MERNSVKHVTVTTLALMTVAAVVSLRGLPMMAKEGLSMIFYILFSTVIFLLPAAMVSAELGSAFSSKSGGVYAWVKAAFGSRWGFTAIWLQWIQNVVWYPTVLGFASSCLAYFFMSPELSASGTYTGIVTLIVYWCATVVALNGSKAVNSVAKYGVVWGTLLPGALIIVLGALWIFQGNDNALFIETITLSSGQTVVEHHHPVLFPHIVGLGSIAFLAGIVLLFAGVEVQAVQVVDMENPSRQFPFAMLIAAIIIFILFLLGSLAVAFVIPADQLSLTAGLMQAFQVLFAHYKLSILTPILGLLMAFGSIGGVMSWVTGPSRGLLATAQQGEIPPFLAKVNKHGSPVTILIIQAIIVSILACLYFIIDNVSVAFFVLSAMTVTLYLVMYMLMFAAAIYLRITQPDLPRVYKIPGGIIGMFIVAGIGFLGVAFATIVGFFPPTNLPVGNPELYVTLVASGMIVFIGLPLIINSMKKLSWKEQRSQE

SEQ ID NO: 10508 - protein, 423 aa, Lawsonia intracellularis
MNIWNVVSIGIGSMVGAGIFALLGQAILLVGKNAFISFILAGIISLLSGYSYAKLASRYPSSSGILEYYNKGFSSKVISGGFSLLYLFTLAISISMVAKTFGLYLAVMISNNYQLSIPDSYLSDIFSTIIIITIFLLNTNIAKEVGKAETTLVGIKVIILSILVIAGLSTIDIDIIINKPSSSSFSIIGSVGLTFFAYAGFGMMTNASGEVKNPKKTIPRAIFIAILFVMFLYTTLCLVVLGNIPLEEIKKHADTAIAIAARPVLGNAGFFIISVVALLATASGINAMMFSGIRIAKGMAEKKQLPSIFLKKTKFIGNGTIGMTYSIIGIIIITNIFNLQSIANMASIIFLLCYLAVFIANWKLRKETQSLKLLIVIGIVSMSAILLSFIYTIIQTTPMTSILLLIFLVFSFLLEYFLIKYVT

SEQ ID NO: 10509 - protein, 416 aa, Lawsonia intracellularis
MSLTELKTMNMPKLMELAEDYTIENASSMRKQELIFTLLQACASRSGGIYGDGVLEILSDGYGFLRSPLSSYMPGPDDIYVSPSQIRRFHLRKGDIVSGQIRPPKEGERYFALLKVKEIGYEVPDNAKHIVLFDNLTPIYPNQRLLMENSDKNYSCRVIDLMSPIGRGQRGLIVAPPRTGKTILLQNIANSINANNPDVYLIVLLIDERPEEVTDMERTVNNAEVISSTFDEPPQRHVQVCEMVLEKAKRLVERKKDVVILLDSITRLGRAYNAVTPSSGRVLSGGLDANALQRPKRFLGAARNIEGGGSLTIIATALIDTGSRMDEVIFEEFKGTGNMEIYLDRHLAEKRIFPAIDINRTGTRKEDLLLPEDVLNRVWILRKLLAPMSSIDSMEFLLGKMRGTNSNEDFINAMSK

SEQ ID NO: 10510 - protein, 387 aa, Lawsonia intracellularis
MNTVIYFDNNATTQVAPEVVEVMMPFFSEYYGNASSMHTFGGAVGRYIQNAREQVASLIGAEPEEVFFTSCGTESDASAIWSAIQLHPEKRHIITTRVEHAAILSVCNNLESKGYKVTYLDVDNKGRLDLDELRSSITHNTAIVSIMYANNETGTIFPIQQIAEIVKEKDVLFHTDAVQAVGKIPVDLKALNIDYLSLSGHKIHAPKGIGAFYVKTGTRYRPYLRGGHQEFNRRAGTENVPYVIGLGKAAELAQDYLEKTNGDDIKVLRDNLEKQILTITDTVVNGDIDNRVPNTTNISFRNIEGEAILLLMDQHGICASSGSACTSGSLEPSHVLRAMGVPFTYAHGSIRFSLSRYSTADEVNIVVKELPAIIERLREISPFKIDT

SEQ ID NO: 10511 - protein, 280 aa, Lawsonia intracellularis
VMWEYTDTVKELFLRPKNAGELPDANAIGEVGSLSCGDALKLFLKINENEVIEDASFLTFGCGSAIASSSILTEMLKGKTVEEASKITNKDIVAQLGGLPREKMHCSVMGEEALEAALKNWRGEATSGPHCHDEVIVCKCFGVSDEHIRKTVAENDLKTVDEVTDYTKAGGGCGDCLEDIQVILDELQGLLKKETTSKPVLTNVQRMQKILHLLDEEINPVLKTDGGSVELIDVNGPLVTVAMRGNCTGCKSRQITLSQFIEKILHEHVDSDIIVEEVNA

SEQ ID NO: 10512 - protein, 122 aa, Lawsonia intracellularis
MKIYALMICSLFFALCLLTTPVAIANNVQCDLTGRDWEKSSTNEKLSFLYGVSSVVVIEQEIAHKEGRKPSLFVQKWIKTFKDDTWMNIQHKIDKWYKEHPTQKNKDVLWVLWYEFMAPNTK

SEQ ID NO: 10513 - protein, 168 aa, Lawsonia intracellularis
VISVIGIDPGSRNTGWGIVHEVSGVLHLVCCGVIQPSCNGSFAERLAHIFQEISSIIMKYKPVEASVEQVFTAQNPLTALKLGQARGAAVVACANQGLLIKDYEATTIKKTLVGHGRATKEQVSFMVGRSLGVKPDWPIDTSDALATAICHLTIRRFENRTARVAKTL

SEQ ID NO: 10514 - protein, 246 aa, Lawsonia intracellularis
MAGHSKWANIQHRKGRQDAKRGKEFTKAAKEIIIAAKNGGDPSGNPRLRAAIAAAKSINLPKDKIEAAIRKGTGQDSGGDITEIMYEGYGPGGVAVLIEVATDNRNRSVADLRHIMSKNGGSMGESGSVSWMFERKGVFVFEKTAYSEEELMEAALAAGADDLHDEGDTWEIHTSMSDFNTVREAFESDKLIMQSAELAMIPQNMISVDIETAKKVVKLLEALEDYDDVQQVYSNVDIPDEIMNEL

SEQ ID NO: 10515 - protein, 200 aa, Lawsonia intracellularis
MKPYRDYYFLKAKHEKYPARSIYKLKEIDNRFCLFQKGMSVLDLGASPGSWSLGAAEKVGKTGRVVSCDIQTITIPLPSNVSFFQEDIFHRSDSFNNILIKEGPFHVIMSDMAPQTTGVKITDHSRSLELCLEALAIAKCYLLQQGSFIVKIFMGADTIELVKEMRQHFERVTSFKPCSSRTKSKEIFYVGLGFKRFTTS

SEQ ID NO: 10516 - protein, 526 aa, Lawsonia intracellularis
MSSLYCNITYNDRKVVFDELGRKKTLASGKDDFVDLFGNSIKQISFDNHPILLLGIGPFPNAWQQLFINQEENKKIFWIESPLFEKQMPEEWHKCIPAHWKKISLKELLELHTFLKLSDCRIYRYLPSYRLFSTFWGMVVGKLQLTHLNYAPSLSSSSIILSGTEKELLTYELNIACQQIGFTPLYFPHQGTLSQLCQIVKEQQPSLFLSINLQGLDSEGYFFYLLQAAKIPVAIWLVDNPWHVLSKLRSPWWKEATLFTTDHSFIYELHKHGAQNVYALPLAAWTKTLLPNSTNSTIHSLNPLVFIGNASFPNKKKFFSGLQLPSSIISQAKLQLNNNDPPHVHWWVKKLAIKQYWPDKKIRLAGLGAEECSLLKRQLWLTIAAEKGLTLFGNPEWKYLLPPKTDVRSPIDYYKTVPHVYNQAKYTLNVTSLLLPKGLTQRHFDVWMFDGFLITDATPGLSLFPKELTEFIAIQSAKDLHSCIERFEKDTTLRLHLMHAWKKHLIDFHLYSNRLQNILSLLQINI

SEQ ID NO: 10517 - protein, 318 aa, Lawsonia intracellularis
MYKEKIVDVAINVFAKPYQTSLSILSLLRHSGSIIDKIYFQFEPYGSKYDLYQPYIIADYLKDQAICFQPQQWIALSSVDKNQLHNINYRHSIRYQYAWEHTNKKYLFIIHNDVFFFKDILTPLIQNIGSHFAIGQLGQCWNCPASHIQIVQESIPKLSACHQERYQLFRPTFIELKKLYTVAKQKNIFVRPYLENSESIFQIQPWTLPECRINEWACLVNMDICAPLTIPIGTVLPFGAFYQCGPICLDTSVAWFKGMHEHNLTAKHMDVSKYMQHWIGTGKMTRIKYVKAEKNASYLLKKYFPHFVDWCRTKNVIF

SEQ ID NO: 10518 - protein, 136 aa, Lawsonia intracellularis
MLTEKNAMSKQFEIYKCEKCGNIVELLFASSGTLSCCGQPMTLMNDSNTSGAKEKHVPIIENNGSGCKVTVSTVIHPMEEKHWIEWIEIVTIDGHHCKKFLNPGDEPIAYFNYPLEQIAYAREYCNLHGLWEVSVN

SEQ ID NO: 10519 - protein, 402 aa, Lawsonia intracellularis
MKPVEITNDIYWIGAVDFNKRNFHGYSRSPQGTTYNSYLICDEKNVIFDTVDEEYSGVMFCRLAKRLPVDKVDYIVINHTEKDHAGALSELVTHCKPEKIFTSNIGKKFLDAQFDTREWPIEIVSTGDSISIGKRTIQFLDTRMLHWPDSMVSYIPEEKLLISNDIFGQNLATSERFADQCDPSSVKKRTKEYFYNIILPFSTQVRKTLDNFKEIQLDIQIIAPDHGVIYRTAEDCDRVLNLYREMAEQKLKQRAVIVFETMWGSTKKMAYAIGSGFDEENVPYSIIDIQKNHHSDVMTALADASGIIIGSATHNNSYLPGIADLLHYMQGLRPKNLIGGGFGSYGWSGEAAKDIQAILSSIGVETPSEPLRGTFIPKHQLLRDCFNFGKTIAQALKNKGQY

SEQ ID NO: 10520 - protein, 433 aa, Lawsonia intracellularis
MDVVMLSRLQFAVAVFFHFIFVPLTLGLTVILALMETKYVKTGEEVYKKMAKFWGKLFLINFTLGVVTGITLEFQFGTNWSKYSEYVGDVFGSLLAIEATAAFFLESIFIAVWAFGWDKIGKKMHLTAIWLVAFASNMSALWIILANGWMQHPVGYVLRNGRAELDDFMAVFLNPYGWGQFFHTIFASWMLSGFFVLGISAWHLYRKNQMDFFKRSVNIAAPFTLIFAIIVALLGHQQGQSVAHHQPAKLAAMECHWETGSDVPMYLLVWPDVEEKRNIIQALPIPGLLSFLADNTTSAEVVGLNSFPDDDLPPILPTFLSFRFMVATGLLFILFAWLAWWYRDRLEYHPKLLKCLIYLIPLPYLSIMAGWAVAEIGRQPWIVYGLMRTKDAVSPIPESSVWISLISFIVVYSFLGILDIYLLAKYGRKGPQA

SEQ ID NO: 10521 - protein, 342 aa, Lawsonia intracellularis
MLETIWFVLWGLLWAVYFVLDGFDLGMGSLMPFLAKTDTEKRIIYNAAGPYWDGNEVWLITAGGATFAAFPKAYAVMFSALYAPLLIILFALIFRAVAFEFRNKIDTPFWRSLWDLFLFLGNFIPALLLGVAFANLFMGIPIDRYGVYYGNLLMLLNPYGILGGIFFVIMFCVHGALWLALKSEGLLHAKAVVTAKGLWFILAALTIAFLVMTYYYTNLYDNYEITPALLAFPVIAALSLIFIQLMLNKEKLLLAWICSALFILCVTFFGVLGMYPSLIISSINPTYSVTIMNGASSPLTLKIMLGVVIGCIPIVIAYQAWVYYTFAHKVTSESIHADDHAY

SEQ ID NO: 10522 - protein, 159 aa, Lawsonia intracellularis
MFFFNANRAKRKKKSKVKKDPILEKSKELFLGGKFPVVTTDTVEGKRISKVLGLVCSRAYDADDAFFGMASRALSKGAHAIVGYSENVAFHPDGTRYFSCYGTAVMFAWEPNEKYGAALMGRKGLEGLATELQLDKSSAVHTQLSVKTSATEPTSDTEE

SEQ ID NO: 10523 - protein, 1187 aa, Lawsonia intracellularis
MAAKMKTMDGNAATTHIAYALSEVACVFPITPSSVMGETTDNWSAANKKNLMGQRVLVQELQSEAGAAGAVHGSLVAGALTCTFTSSQGLLLMIPNMYKIAGELLPAVFHVAARAIAAHALSIFGDQQDVMAVRQTGFSLLCSSSVQECMDLALVAHLSAIESRVPFCHFFDGFRTSHEVQKINVIEYEEIQKIVNWEKIHIFRKNAMNPEHPYQRGTAQNPDIYFQNRERSNPFYNAVPGIVIDSMQKVFSITGRQYQLFDYVGHPEADRIIIAMGSACEAITEVINTLNNQGQRLGLIKVRLYRPFSVEHLLRAIPPTVESITVLDRTKEPGALGDPLYLDVCTAFMETRDVKHPHIISGRYGLGSKDFTPAMIKAVYDNMLPNNRKNHFVVGIKDDVTHTSLDISDNFDTVPPGTIQCKFFGFGSDGTVGANKQAVKIIGDNTDKYVQAYFAYDSKKSGGFTASHLRFGDHPIRSTYLVTQADYIACHHPAYVIQYDVLEGIKEGGIFVLNSSWNTIEDLERELPPPMKRTIARKKLRFYNIDAVKIASEVGLGGRINMIMQTAFFKLANIIPFEKAIELLKQSIQETYKSKGEDVVKINYTAVDNTVSALNEIQVPSTWADASTEFVIPRYKNVPEYIKTFVEPILTEKGDMLPVSSFTPDGIVPLGTAAYEKRAIAIDIPEWIADNCIQCFQCSYVCPHACIRPVLATEEELIGAPETFVTKDAIGKELKGLKMRIQVYPEDCVGCGSCADVCPSKPKSLIMMPLETQRQEQVINLDFAQKHISLKDNLMPRDTLKGSQLQQPLLEFSGACAGCGETPYVKLLTQMFGERMFIANATGCSTIWGGSAPTAPYCTNKDGHGPTWGNSLFEDGAEYGLGISLAIQQRRAKLAELIKEALTIEGISTELTNALNGWLEHQEDVDLSKKFGQDITTILSNTPTNPIFAQILEREDLFTKKSFWIIGGDGWAYDIGFGGLDHVIASGNDINILVLDTEVYSNTGGQSSKSTPLSAVAKFAASGKRTTKKDLGRMAMTYGYVYVASVSMGANKQQLLKAFKEAEAYKGPSIIIAYAPCIEQGIRKGMGKSMEESKLAVDCGYWPLYRFNPELAKQGKQPLILDSKAPDGNLRTFLAGENRYAQLEKNDPETANKLHEELNKEYNDRYRLLKQLSELTVTASEDPLLQR

SEQ ID NO: 10524 - protein, 706 aa, Lawsonia intracellularis
MANKLYITATEKRSGKSAVTLGMMQLLMRHIRSVAFFRPIIANIDPNKKDHDINLILTTFNIAMPYEDTYACSFKEARTLIAEQKSPVLIEKIIQKYKHLEDNYDFILCEGTDYLSNDSAFEFELNIDIAANLNMPLAVIVNGKNKSIEDLISSTVTSSELIFDKGQDIACLFINKTTLAIPELENCKKAISTAIGSQVPIAMFPNNSVLSRPTVSDIKRWMKAEVIYGEECLNNSVEDYIITTMQPNNFLDQLQQGLLIITSADRSDIVLASLASRLSMTYPDIAGIILTGKFELSSHITRLINGWQSVPVPILTVSQNSYQAIMTLSELYGKINVSDTRKIHIALAIFEQHADSNAITQRVIERTSDKVSPKMFEFKLIEQARRHKMRIVLPEGTEDRILKAAEVLSQREVADITLLGDIPTIHKKISDLGLSLHNVQLIQPNQNHALFENYVQTYYELRKHKGITLDDARDWMNDTTYFGTMMVYKNDVDGMVSGATNTTAHTVRPAFEIIKTKPGASIVSSVFLMCMKDRILVFGDCAVNPNPTAEQLADIAISSAQTAHVFGIPVRVAMLSYSTGTSGKGIDVDIVSEATKIAHEKAPHLILDGPIQYDAAIDPDVAKTKAPTSVVAGKATVFIFPDLNTGNNTYKAVQRAAGAIAIGPILQGLKKPVNDLSRGCTVTDIINTVTITAIQAQAEQGLITID

SEQ ID NO: 10525 - protein, 404 aa, Lawsonia intracellularis
MKVLVINTGSSSFKYQLIDMPMEQVLVSGLVERIGEEVGQMVHKIYPNTSQEKKYTTTQPFSTHVEGMQAVVAELINPKHGILHSVKEIYAIGHRVVMGGETMKHPALINQHVKNIIRECAIFSPLHNLSHLAGIETAEELFPGIPNVAVFDSEFHQTMPKVAYLYPLPYDIYDDYKIRRYGFHGTSHRYVAQQTANFLNRPIKELNFITCHLGNGCSMTAIKNGKSIDTSMGLTPLDGLMMGTRCGDIDPAIVPFLIEKTEKSAKDVDELMNKQSGLKGICGMNDMRDIHEACAQGNAKAQLALDMFIYRIKKYLGAYYAILGHLDGIIFTAGIGENDTIVREKVCSGLENLGIFLDSSRNNTHSSTLRLISTDNSPIPIFVVPTNEELEIAKLTIQLVSNTQ

SEQ ID NO: 10526 - protein, 303 aa, Lawsonia intracellularis
MNYRKVICIVGPTGVGKSEIAFHLAKRYDGIIINADSRQLYKGVPIITAQPTFEERSLIPHKLYACLDLHEKISAGRWATLAAEQLDSVCHTKIPLLVGGTGLYLRALFDGIVTIPPISTELSLTMEKQAEEKGISFLYNMLKVHDPLYANSIHPNDRQRVLRALTVFYETGKTFTWWHQQVTEAYPATVLRIGIKIPLIELAPLLEKRIDKMFVQGAIKEVITTYKRYFNKDVQNWSGIGYMELLGAIKGEYTFNEAKERWLKNTRSYAKRQLTWFNADKRIIWFCPDQLEDIQKCVENWLS

SEQ ID NO: 10527 - protein, 172 aa, Lawsonia intracellularis
MEDTKIRLAIYPGTFDPLTNGHISIIHRAKHLFDKIIIAVAQDSGKKPLFSIEERVSMINTTFFSDHMVDVENFSGLLVDYVEKKNAKTILRGLRAVSDFEYEFQTSLMNRKLCPEIETIFLISDYKWLYISSTVVKTVASLGGDVTDFVPENVLICLKTKYCQSKSNLVIT

SEQ ID NO: 10528 - protein, 190 aa, Lawsonia intracellularis
MRIMTGSLRGRILKTIEGDGYRPATGKVREALFSMLTSRGIVWDQTYILDLFAGSGSLGFEAISRGAAEVCFIENNPKAVQCLYKNIEKLRLFEQVSVVEQDVIQFLNQDSLFKLYQLVFIDPPYGGNRLETTISCVVEKGWIAPEGYIIAEVETTLRINFFQLHPQLELLSNRSYGQTRLLIWKTQKYV

SEQ ID NO: 10529 - protein, 533 aa, Lawsonia intracellularis
MKITFLGAAKTVTGSCYLIEACGIMFTVDCGMFQGNSIIEKRNFEIQHYHAKELQFILLTHAHIDHSGLLPKIVKEGFHGRIYCTAPTKDLATLMLEDSAHINEMEAQWKNKKYARHGKIEKEVLPLYTVEEAQNVSPLFTPVSYNTMFEPHPGIQVTYHDAGHILGAAFLELVIKEEGKEVRLVFSGDLGRTDSLLMHEPMTPPQADFLFIESTYGDRNHKIDQATFDELVDAIHYSWTHNSKTIIPAFAVGRTQEILYCLYLLKQQNRIPDIPIFLDSPLAIQTTKIFETYNSYLKFNDHPSFKTILDGLSVKYTPSVKESKEINELKGSAIIISASGMCNAGRIKHHLFNNAWKTGVSIVFVGYQAVGTLGRKIVDGAKTVRIFGEDVAIKAKVYTLGGFSAHAGQQQLLDWIGRMYQPQMEVLLVHGEEKAQEVFSKLIQQKYGLTVYIPSYLEQLELTAESQKVIVSESKNIQPVEWSKLTDTIKNNFNNINLKLKNIAQKPWETQICMYDRLVELNQEIESFLNYNK

SEQ ID NO: 10530 - protein, 455 aa, Lawsonia intracellularis
MIFRIIVIFLCSIMSFTFLSNGYVLSKPTEQCVSSYQPGMLKDLMVFPQSLKVYSDLLGEVTLISGKKLEEKYNFFKKRFFQPWDSTEPIFPVHDAYIIFSYPNTKSHATWWAENLLPWTEKNWKAVEKNAARSTYPSCNYKGIITERTAVRAAPTVSPFFRNPSLAGEGFPFDYLMEANIHLGTPVVVTHISEDEAWVFIETPFVSGWVRDNVVAKVNSDIIKQFLSLPQASIIYDGVLLKDASGVHGGAGFLGTVLPMVKLTGDTAMLLVPVRDQYGNAHIITAETPKHNVLPMPQVLTPKLLASIGESLIGQPYGWGGLFGRRDCSEMISDLFIPFGVWLPRNSQQQVHERHFINLEHVSKEKFYSVMKTQAIPFVTLIGFQGHVGLYLGMYNDTPVMLHDLWGVHTIDNGHKGRYILGRVIISSLDLGNELCNLNKDETLFSRLEGISILN

SEQ ID NO: 10531 - protein, 446 aa, Lawsonia intracellularis
MRYKNYIAFCMISLFLCLTGCKTFNCVSPQLGTIKDLEVFPQDLQVYSSVLPQDPLITKDRMLDEYALFKKHFFQPWSKDKASVPASTVYSIFDRPNTKENIRWWAENLLPWTDIHWDEVKKNAAISTYPSRKDKGILIQRTSVYAAPTQSSFFLNPQTAGEGFPFNYLIESNLHAGTPVFITHTSTNGDWVFIETDLVSGWVPEHTVALISDNISKWFSSLPQAAIIHDNVALNGRSGRHVTTGYLGTVLPIIKSTPTELVLLAPLRDQHRRARITEVYVSKIHTTIIPHELTASFIADIGNPLLGQLYGWGGSFGHRDCSELMKDLFIPFGIWLPRNSQAQIHAWNYIDTTQLLEDEVYQLMKDKAIPFATLIGFKGHIGLYLGMYNNTPAMLHDVWGIRTIQSGSEGRHILGRIVITSLKPGAELCITDSLLFDKRTGISVLN

SEQ ID NO: 10532 - protein, 732 aa, Lawsonia intracellularis
MAQLDIKEQIVLQGILDRIVFHNSENGYTVFRLKPENSDDIDTVPVVGYLNNPQPGASILVSGQWVNNTRFGRQFQMSTFEIRLPASVEGIKRYLSSGLIKGIGKKTAESIVTEFGEETFHILDTSPEELLKIKGITKKKLDQITECWQEHQTTRELMVFLQPYGISVTYAVKIYKYYGQQSLNIVKENPYRLAMDIHGIGFLTADALATKLGFEKDNPLRAQAGILYTLLKCMDEGHVYYPKEAFIELTSHNLGIDHQCIEDAIEHLKREERIVCEALDEHIGIYLNRYHHYESQIAFYLQRILHSPKSVQFKNTDDTISQVINKLNITLAPEQMSAIVTSTTSKIMILTGGPGTGKTTVLNAIIQVFKENKAKILLAAPTGRAAKRMSEAIGMEARTIHRLLEYSPRNDGFIRNEDMPLACGLLVVDEASMMDIMLTYHLLKAIPLGATVIFVGDIYQLPSVGPGNVLKDLIISQLLPVVELTEVFRQAAESQIVCNAHLMNKGEVPCLESSKEALSDFYFIRQSDPDKAADLIVDLVKNHIPRRFKFDPINDIQVLTPMHKGTVGAASLNKRLQEELNPTSQFLQRGEKIYRLGDKVMQIRNNYEKDVFNGDIGRITYIDMEEKSIVVNFDERLVSYPSDELDELVAAYAISIHKSQGSEYPAVVIPLMTQHYVLLQRNLVYTGVTRGKNLVVFVGESKALAIAIKNNKTQKRHTWLSARLVNGMLQKL

SEQ ID NO: 10533 - protein, 417 aa, Lawsonia intracellularis
VNNQKYKKNIQKNIEYHSSAEKTQKISAKSTLPYPQKIADPPIHSFLQMTSVAIPLIVGGLFLNNSRAEKNIHNLRNDYVPKFNFHYEDYLQFAPGAAMLGLKLGGLEGRSSWARMLFADAISIGLMLPTVEIIKVHTKKKRPTGSSHQSFPSGHTANAFMLATMLHKEYGETHNRWYSILGYTAATATAIGRQLNNRHWLSDTMVGAGIGIMSTEIGYLLTDLIFEDKGIIRPIREPKTIDKNRKPSFLGLYAGINQMSGKTKIDSVEISTGTGANVGIEGALFFNPYIGVGGKFSAANLPILKDGKLQKERYIDILSGYGGLYFSYPLTRRIGLGSKVLAGYNYYRQSKSLPSSSIKIGGKKGLGICTGASIHILANDSLSVSCFLDYNFIQSPLPKDKKLRATQTLGLSTNIAF

SEQ ID NO: 10534 - protein, 278 aa, Lawsonia intracellularis
VSHRTIKEIVTGYKSVDGAGVHLVCVLGSLTVKNFDPFLMLDAFDSRNPEDYIKGFPMHPHRGIETFTYLIQGNVEHKDSLGNQGSILDGCCQWMTAGSGILHQEMPKATERFLGLQLWINLPRIYKMVAPKYRDITREMIPKVEEDAGTVAVVTGKYKDVPGATKGEYVNINFFDLTLKPDKVWQVATDPQHTVFAYIVEGECGFESALIPAKRAILFNPGKDLFIQTGLDGARVILVSGKPIQEPIAWGGPIVMNTNDELQEAFIELESGTFIKHS

SEQ ID NO: 10535 - protein, 449 aa, Lawsonia intracellularis
MDKNRLGSFLFFMEQSLNIKRILFIVLLLCEMAFLVGAYWPGAMSIDSVSQYEQAVTHTYEDWHPPIMAWVWSCFILVYKGPIPMLLFHTFMFFGATALLCLMYSKKNRISWIWLILPLLPFIAGLSGVLWKDIGMAYAFFFAFALFHLGIHIQRQSYYSYLLFFLALCFFLYAFWVRDNAIMASAPIVYYLVTIGFPNWKKIYIFGVSCIILICLFCIGRGINKYMLDAKSECPTMHMKIDEIAATSRIVGKNLFFKESTVHEFPVEELPIVHLDKGWKFYSIVQLTDNLLKENWYSVMRNEPWAYLQAKLRLFNNFSRFPIKTPRCVSYFVMHKNNYGFTFEKGRASDILYSYVNTTKNILPILFLPIFWIPLAGILFLYVLKRNDLLGIEVKMLSSSAVCYYLGYFIVTPTPDYRFIYWIVLATTVATFLLLCDRYSYTSSEFSNI

SEQ ID NO: 10536 - protein, 526 aa, Lawsonia intracellularis
MKSDPVIILGAGPAGLTAALELLRSGKHKVIIVELESQVGGLARTIVYKGNRMDIGGHRFFSKSAQVMKWWLDILPLQGKSDKKDFPSSSQEYNRDEDVIHGPDPEKEDRVMLIRRRLSRIFYLRKFFDYPISLKYSTIKKLGILRVVKMGIGYIRVCFFPIKSEKNLEDFFINRFGRELYKTFFRDYTQKVWGVPCSDISPEWGAQRIKGISIARVLRHAIRKIFQSDKTIEQKNTDTSLIEQFLYPKFGPGHLWETVAKEATALGATLLLNHKVVGLDIEDSQVTAVYIENCNNGEQSRVDCSAVISSIPLKELVEMCKNAPSSVQEVSNGLVYRDFITVGLLVKNLRLRDDNDRESNHSVPIKDNWIYIQESDVVIGRVQIFNNWSPYLVSDPQKVWLGLEYFANEGAHLWSMSDDAFKQMAIQELISLGFITCLDVEDVTILRVKKAYPAYFGTYFRIAEVQKFLDSIANMYPIGRNGMHRYNNMDHSMLAAMQAVKCLMDPSIDKSVLWNINIEKEYHETN

SEQ ID NO: 10537 - protein, 221 aa, Lawsonia intracellularis
MNNFITYSQPTLPAGFVDVQKVIQSILVDLKYVGSDNFVGRPIPGYNTNRVILSKEATVALANVQTELQQFGLSLLIYDAYRPTQAVDAFINWSNEPEDKKIKQKYYPILTKKEIFDQQYIMKKSSHSRGSTVDLTIVSFNNTTNQNNMFYTPLDMGGIFDFFGKESHPDFQNITPQQKANRLFLRTIMTKYGFTPISNEWWHFTLANEPFPETYFNFPIE

SEQ ID NO: 10538 - protein, 188 aa, Lawsonia intracellularis
MAEYRTITTPLIKEVTRSLHIGEHVLISGTIYTARDAAHKRMIETLQKGEKLPVSLENQILYYVGPSPAKPGHIIGSAGPTTGGRMDSYTPAMLQQGLTGMIGKGKRSAKVLNELKTYGAVYFAAIAGAGALISQHIIKYTVIAYPELGPEALAAMEVKDFPVIVVGDTEGKDFYVEGPREYLKHIAS

SEQ ID NO: 10539 - protein, 281 aa, Lawsonia intracellularis
MKEIHVSVIEDTVAQLAIDACCKLPHPVLTEFKNGIHNESSPLESCILQHLVNNAELAEREMMPLCQDTGLAVIFTEIGQDVVITGGDFEEAINKGVRKGYISGYLRKSVVADPLFERKNTGDNTPAIIHTRLVPGDTLMIRFGVKGAGAENKSKLKMLIPADGIDGVKRFVLETVMEGGASACPPLVVGIGIGGDLEIAAICAKKAALRDIDTHNKNPQYAALEDELLQEINKMGLGPLGFGGRMTACKVNIEFFATHIASLPVAVNLNCHSARHTEVWL

SEQ ID NO: 10540 - protein, 201 aa, Lawsonia intracellularis
MLLIAVALCFFGMFLMFFYIVFSQDRIVRTLNRKYKEFYEQLSKIESAANAIYFSSNRPYPVEDTFSMQQPQSSPKRNAPQPVVNQNIPSPTMPPNNLSMNNQQNVPQAMALNNNNNNNRNMQPAPQYQQMNVMGNGQGHYQQDVSYAQSTPTGAHMGQIMMEDVFPLQEDMIAGGPETSIPARQGEQRMDKSSMLELLQL

SEQ ID NO: 10541 - protein, 349 aa, Lawsonia intracellularis
MSLIRSQAYTNAGVNINAGNALISNIKSFVSETNIQGVLSDLGGFGGLFKLNLTQVDNPVLVSSTDGVGTKLKFAFDFNKHDTVGIDLVAMCVNDILVQGARPLFFLDYFATSKLDVDKATQVIYGISEGCKQARCALLGGETAELPGMYTEGEYDLAGFCVGIVDQSKIIDGSSIKVGDTIIGLASSGIHSNGYSLVRQIINQCAIEPDNIIPGSRDTFKQVLLKPTFIYSDIICNLIKDISIKGMVHITGGGFYDNIPRVLPQSVVANIQFSSWDIPPIFYWLQEQGSLSWSEMLQVFNCGIGYVLIIPNDSVTRAMNILKSMEVSAWIIGSIEKQNVGDEQVIITY

SEQ ID NO: 10542 - protein, 125 aa, Lawsonia intracellularis
MNKKKSLYLLFIGYCYQFQIKRLLLLMTIIIANTIFGFKYIICISHAYTITTPNNPSIFIGTDIKGDKIIQVVTPISDMEQQPTPPLIIIPKVSVPWEPTVPIVKPLDTITPATPKVQSINPMKK

SEQ ID NO: 10543 - protein, 318 aa, Lawsonia intracellularis
MTKNPFITRKKKIHYVNKKNLQSCNDKQKNLTNQDELTDSYNFFPVQEEPSSDEELFLQHIGQTQKIHNKKYVLPYHKEKISKNITINKNSRNKLTLDTKIDKTNNQKTISSNKSTIQTSQSNILLPNDNLTENNTFLTAVKDVVPLSGKSRITTYCRPTKWTQTDITSLTTNKKPIKFNIVKKEEQLEGHIEGFDKKLFTQLQSGLFRPKTTLDLHGFNIQQAFYTVVKFLHTAYITGQQPALIISGRGKNSPQGIPVLKEKLYEWVTQEPLKRVILAFCTAHARDGGTGAIYILLRQYKKTWNIHWEQRPLDPDLL

SEQ ID NO: 10544 - protein, 695 aa, Lawsonia intracellularis
MATFILEIGTEELPARFLLELQSELGVRFLDSLQSMGYRPTEVSDYSTPRRLVVCIKGLDMIQPHCEEVVIGPPINIAFDKDGNPTKAAEGFAKNLGITIGSLSQISTDRGEYISGLKVKGGIPTKEVLARLCPEIITALPLPKRMRWGNNPFTFIRPIRWIMALLDSDIVPFELAGIHSNRNTVGLRNNNVPFIEVPSSTDYYMLLKEVGNVILDPNSRKDSILQLGNKEAQLIGGVVNWNERLLNEVIGLVEHPYPLLGTINSVFLNLPREVLLTSIETHQKSFGILDSQGNLLPYFLTVLNMTPPDLALVKQGWERVLQARLEDARFFWNEDINSSFDEWQEKLTHLIFLDPLGSIAQKEHRVSLLCEWIAKYIPTSNAEEARKAGSLSKVDLVSKMVEEFPELQGVMGGIYARHKGESESIATAIAEQYLPSGPDTDVPVTDLGAILSIADKIDTLVGCFGCGIIPTGTADPYGLRRCALGIIRILIEKEYPINLHQLYTRAQDNFVNVSWKLAPEDVLQKLHEFIIARLKNYFLALGYDTLVVEAIVSTQTSQLWSIKDRLDSFILLSQHEDFSQLVQTIKRVINIIKKQDKETEIVLTGHWNPSLFKDTAEKVLAEKLMIAVNKFNQESQTASLPVFMMLLKLQPAINTFFDQVMIMSNDIEVRRNRLNLLKALLLYIESLADFSVLQI

SEQ ID NO: 10545 - protein, 294 aa, Lawsonia intracellularis
MYFQDIIFMLQKYWSSRGCVIAQPMDIECGAGTFNPATFLRVIGPEPWSVAYIEPSRRPTDGRYGENPNRLQSYFQFQVVLKPSPDDIIEQYLGSLQILGIDSTLHDIRFVEDDWESPTLGAWGLGWEIWLDGMEVTQFTYFQQVGGIDLEPISVELTYGLERLAMYLQEKDSVYDLQWNEYVTYGQMYHQNEVEQSSYNFDESDVSMLLKLFKDFDNECRQLIKKGFVWPAYDYCLKCSHTFNLLDARGAISTTERASYISKVRALASSIAKLYALQREKMGYPMLLKGSGEI

SEQ ID NO: 10546 - protein, 249 aa, Lawsonia intracellularis
MEWLDNAIILELGSFRESDVWVKLLTSQHGVISAFAFGGHRSRRRFCGCLGILNEIQVRVQTSRNGRFLNLQEASLINGPIQLRTNKNRFGAFINCIRFLEVVGVSSDAAPPVYTLMKELFYFFEKNTQPYEIIPILFRLRIASEQGYAPIFSNCAKCGRLINNKGFFGISDGIIVCSICINYIKTPIAIGYESLELLKRVQLASPYDWKLSENTKSAAAQKYECTEIINAFVEYHLGITWSKGRFLKV

SEQ ID NO: 10547 - protein, 339 aa, Lawsonia intracellularis
MENHIDNSQEVHSALKEIGSLLYQERVKKGYRLEDISIYLKISIHTLQAIEEGTIDSLPHLVYTKGFIRSYAQFLDIPEYELTSIFYRIEHTEKTNDEGEDYPFKKKKFFSPYVWGSILTFLCILAGSWLFYSSDITFSSFDVIAQMTDSGKKEVLPNQKKEENQSEGSLSLPQQQSQENIKSNSSVVVTKIPENFQDHIVIKKELELSSKEDSSSQLSAQLDEKSFSQSTDMTNKSDKSDVSDKSVVEPVHMNKPGKKNIVVLKGLEDCWVHSTADKTETRQFYVQQGQLVALSFSKSLVLKLGNAGGIELKYNGEKLPPVGRSGQVKTITLPLVSQN

SEQ ID NO: 10548 - protein, 308 aa, Lawsonia intracellularis
LRFFIFLLLLFISILPVSAEQFINKTVAVVNGEIITLFDLQAETAPEIFRQQLNPNNPADKAKVEQLEKAILEGMISNLILTQEAERLHVNVGKDEVESEYHNFIAKSQLTPEEFQYQLELQHLTEDSFKERIRSSILRSRLLGAMVGRKIVVTKKEIEDYYQKNHDKLKNNNQLQLAILVYPPDINAKDWAARIKSGSVSFEEVVKKVSVGPKAKEGGDLGSIDIEDLNPEWLEQLSTMKPGEVTSLIDINGLQGQLKLINIIKGEPQTLETLTPYIEEILREPKLEERFKEYTDQLRKRAVVDIRY

SEQ ID NO: 10549 - protein, 305 aa, Lawsonia intracellularis
MFNWLYIFIIFTLYYCVFPFSLYAVENFPSGVMAIVNGEPITLQQVEALHDVSGNILPLREKPEVHFLQEQYGDSLYTLIIYTLMSQELGKLGLKVTEQDVLLAENEIKQDYVGEDFEKSLQEEYLDIETWRQLMKQRLTFQRFQHHILRPKFTLSSDEIEEYYFKHYSEFFIPEKVEIIWYQEVENSQQRKAKHKDCDRNDIEQGDIIRVALDRLPAKMRQDLMKIKPGEYTPRHKEGEIYQYAFLRKRYPAHQADIIEAYSRIELILLEQKMEQAYEDWLEQVIPQAKIKVCPQFQPNIIYKE

SEQ ID NO: 10550 - protein, 1155 aa, Lawsonia intracellularis
VEYKECLKQLLRCQNKRIALQKAGLATQVKLSVDLIAHGAKVLLIARNRDELGTLHSLISVFTSEGGHNVLKSNNIFNNTWVTLSPFTSRSLSKEGWAERLAALYALRYGKVQGLILTIDNLLPKEVPLDFFDNQVIQLSVGEELSPDIILEQAITWGYDRVSMVSNPGEVSRRGDIFDIMSPGYHYPLRLDFFGETLEEIRFFDPLTQRSKGYIDNAIILPVYPVRSGTEYIATIESYWNKLLKENVITENEHYSLFRLLEQKDFSLLPGCCYENATTIEQWVNKDKVWILPSLHEAEDILTSMENSWNDRLKRESGFIQPLDLAIRNTLQVKELWCQSTIVHTESLDIDIDDQEEVVELPEKAISSFQMLFPTVAEQDRPWQHLIQAIKKWKQDKYQLILSFSSERSRNKFLNLAEQDGVTPFLEYHPTQQGCFAIISPFRVGVDLSWFNILILGEDVLQPHTGKSRQAPAESFKGLSRYDDLNPGDLLVHKNYGVARFGGLIRMDIGKISNDFLLLEYAGNDKLYLPVDRLSLTQRFKSVNESFPQLDRLGSTSWQASKDKAKKSIEKVAEDIIEMYAWRKVAKGFTYPPVGDLYREFEASFGFEETPDQARAIQDVLADMEKSEPMDRLVCGDVGFGKTEVALRAAFRAASEGRQVALLCPTTVLAEQHYYTFRSRLSGFGINVGLLSRFVPLQKQKEIFKAASSGQIDVLVGTHKLLSDSVSLPNLGLLILDEEQRFGVKHKEKLKKMKKNVDVLTLTATPIPRTLQLSMSGICELSVIETAPPERKPVATAIIKKNKEKLKEILERELAREGQVFWVYNRVQGLEQIVNFVKELVPEARVGVAHGQMPEKQLEENIHAFWHAELDILVCTAIIESGLDFPRANTLIVDQAHMFGLGQLYQLRGRVGRSDRQAYAVFVISDLESLSEQARERLRIILELDYLGAGFQVAMEDLRIRGAGNILGEAQSGHISRVGIELYLEMLEEAVTKLKGEGVTSYPETELTLGLTAHIPQNYISDSHERLRWYKALSSAQSVMARNEIELELRDRFGVLPNELKAFIAVLNFKQFLTESQVIKAEIYEDKIKLVWPEKQTVVSFDKLMLFISAQPDKVKLSPPATLEIKLNTTLPIEDRLISLQEELSVVFSYDSIKQ

SEQ ID NO: 10551 - protein, 527 aa, Lawsonia intracellularis
MLKDIVRIIKKMTHTMGIMLVACIFIGAVYLLYREVSKYSFSELKMSVESISYWSLFLSALLAILNYIILVGYDWLALKGIHKRLPLKKVALVSFVGQAVSYNFGALLGGSTIRYRLYSSWGFSPMEIVKLVLMLAITFWVGAFGLAGLIFMFVPPAIPPELAVYFPTEDIRPLGVVLFALAAGYLFICKLIHKPVHIFGKEFSFPPFNIAIAQAVVASADLVAASACLYVLLPEDAGISFIQFLPTYLMAMVAVVLTHVPGGAGVLEIVVIHLTNTTPQAILAALLCFRVIYYLIPLIIAAAMYLMYEVNQQTQENIKFLNKMGRYIRIHIPTITSVIIFTTGIMLCFMAVFPVRYYNMKLLEMLLPVWMIELGGIITGVVSIFLFFFSIGLKYKRKYILYYTLVLLLIGCVSVLTSTLNFFITGFLIILIVLLICIKKYFYIKSSIWKIHFNIRWIITSFCIVICAAGLGFSLRHIDVTNIRWLAFVYFKDGHKLIHILFSECVIIGILLLKYIQIHYMKKVRKK

SEQ ID NO: 10552 - protein, 157 aa, Lawsonia intracellularis
MSIPISQQGYQNLEKELDRLKKERPAVIQAIKEAREEGDLKENAGYDAARERQGMLEARINYIESRMAQFNIIDITTLSGDKAIFGATVTVEDIDSGERKEFTLLGPDEADYTKGSISIQSPVGRALLGKKVGDELTVDVPRGRISYEIIDIQFKHQ

SEQ ID NO: 10553 - protein, 436 aa, Lawsonia intracellularis
MNNTPWTFSIVTFGCKVNQYESQSIREAWSNLHGEEVATPQTADIILLNTCAITANAITDARQLINKLHREAPNSKIILTGCATDLTNEALYKLPGVYTFISQKNKTQLLSNLPLTQLNQDQLQTNTNTFPQFSISNFNRSRPIVKVQDGCSHSCTYCIIPSTRGKPKSRSPKECLIEIQQLLNAGFREIILSGINLRQYTATQQGCKDFWELYSFLDKKLSPTWKGIARLRISSLDPAQLTQRGLDILSNSHMGCQQLHLSIQSGSAEILKKMHRSHYTPQYLLDTTKKLSTIWHKFGLGADFIIGFPGETEKHFQETVDLIKELPLTYGHIFPFSARPNTIAATLPNHIKKSESQQRAATIRQLITQKEKIFHKQLLTMSTLHIAPEGGGKTGGVDEYYTHCHLTEPVETRQLLKVKPLSLTKKGLLVEILPPH

SEQ ID NO: 10554 - protein, 293 aa, Lawsonia intracellularis
MLRSMTGFGRCVVEDSDWTQTWEIKSVNSRYLDLKWRLPLIARSLEQKFEKIVRKYASRGRVELNLTIQQIESQATPLCFNESQALSMLNAITELAKIRGDTFSPDYMQLLSVSSLWEKIEDENDNNIEGRLEEGLIAALEDWNESRETEGSILYKDLSQRISKLKEWLSQIEDQAPCIKEERFLQLKERISEALEKAGGLLEETRFLQEIVIHTDKLDVTEELTRLSSHLDRLYEILGKGSDVGRRLDFTLQECFREISTCGNKIQDAQISKVVVEFKNELEKCREQVQNLE

SEQ ID NO: 10555 - protein, 212 aa, Lawsonia intracellularis
MTKESSVLNHKASGTALVICAPSGTGKTTLIQRLRKEFPCFAYSISCTTRPPRKNEEDGKDYYFISQEEFIARKNEKYFAEWAYVHGYFYGTPLAPILTILNNGQDILFDIDVQGAAQLYLTLPYAKYIFLLPPTMVELEKRLRSRGTDREDIIQHRLLSATQEIRQAHWFDTWIVNENIDKAYDELRATYLASKLSPKFQPTLITSILEGW

SEQ ID NO: 10556 - protein, 229 aa, Lawsonia intracellularis
MAKLIVALDYTYASEALAMANILKKHVEWVKVGLELFTHEGPSIIQLLKRMGFKVMLDLKLFDIPNTVKGSVRSACLMDVDMLTLHILGGEHMIKAALNEVQSSIQKKSHSPLLFGVTILTSIKQGELPGYNQDIASMVLNLAAYGQQWGLHGIVCSGQELTKIKALYPSLSCLTPGIRMSYSQKDDQHRVMTPSEAVKAGSDFLVIGRPITQAEQPIKIVEDIISSIM

SEQ ID NO: 10557 - protein, 272 aa, Lawsonia intracellularis
MSEQQQAKRIRGVFSSQEIRKVGTGTTTRKTVSKIFWFVEQAEDGNIFIQSINTNYVPTGLPKSITMEELLSKYSPEPEFYVQSVFPKMQQLAESLNKADESREKGETFTAEFEYENALKLDEENVRANFGIGLTYLSRGESEKADNIFERLVHLDAAFEEQHKHLFNEFGINLRKNKMYNQAVDYYTRALELTKADENLHINMARALFEQKNYTACIDQLFQALELSPENTTVIQFLTWLDNKKLVPQSHQKKVTDTIQSITTKNSSKKDD

SEQ ID NO: 10558 - protein, 568 aa, Lawsonia intracellularis
MKKWLTAPISSQIPLHWANILHIPEPILILLWQRGITSLEEMNIFLSPKLQYLAHPKHWSGIEDAVELLNNAIEQKQPIIVWGDYDVDGVTGSTVIREVLTFHQAQIIVHLPDRKKEGYGVNIPVIEQLALEHPKALLITVDCGISDVKAIYRARELGFTVIISDHHLPPTSLPPAHVICNPRIGENPCSYLAGVGIAFFLMAALNNKRAEQTGQRMDMRDVLDLVALGTLADMAMLSGQNRILVKNGLLKIAEAKRPGIAALKTVSGFTPLTHLGAGQVTFHLAPRINAAGRLGSPRIAHEMLYTTSKDFAIEHATLLNKINEERRSEEEYIFNAALEQAQLENQRQGLVLHGSDWHQGVLGIVASRITEAVHKPVLILCTDGKMLKGSGRSIADFDLYHGLSQCADLFERFGGHKQAAGLTLPINHLHILKERFDTVVRNFFGDTPITPILHIDMELPFQKATNFNFLKSLELLQPFGIGNPEPIFSSLPLRIQRCNTFGKHKEHINMLVVEEISGISLQAKGWRLAKNISSSLQNSRIQLAYTPSLNFYNGISSIELEIKDWVEL

SEQ ID NO: 10559 - protein, 408 aa, Lawsonia intracellularis
MITALEQFPISEYQSRIQKCRDAMNQNFPQVGGMLVCSRLNIYYLTGTLGVGLLWIPNDNREPILLLRKGLERAKVESPIKQIYQFKSYKEIRTICEEAGSPLSSTIAIEKKAFTWTMAEMFQQRVPGINCLSCDGILEKLRSIKSEWERKKIRICGERHKRILEDILPQELSSGHSELEIAHLIWKHCFEHGHQGMLRCNNPGEELFLGYVSVGESGNYPSYFNGALTGRGIHPAVPFMGDAGVIWKKHMLLAVDIGFMLEGYQTDKTQIFWSGPVSSIPDKIKRAQDCCKSIYEKVFSMLQPGVTPEEVWNVAKKESQSIESPATFMGTGKDAVPFLGHGIGLTIDEYPVFAAGFKEPLQEGMVIAIEPKISLPGLGTVGLEHTLEITATGVRSLTGTNLDIIPVE

SEQ ID NO: 10560 - protein, 138 aa, Lawsonia intracellularis
MQHPSDSTLKDILSQSKTIAIIGAKDEPNTPVGRVGQYLIKVGYTVIPVHPIRKSVWGIPAYTSITEIPVHIDIVDLFRAPEFCPIHAHEVISLLQPPQLFWMQQSIISPESVNIVQQYGITAIENLCIMAEHKRLFN

SEQ ID NO: 10561 - protein, 303 aa, Lawsonia intracellularis
MILDKYYKILHVDNSAFLDDIKRSYRKLAFALHPDLNPTIPHATAKFQQLNEAYVILLRAYKSNTSKSHSKTTTKQSTTNATQQKNKERDKAYRKNKTEYIKSTSKKTHSKNPHKNSIFEASIDENFDEKQKILQDILNDDFARNVFEDIFRTIQNKQTKSSNIQDSSTQNSSQNKKPSIITRLFQTIGQITHSFQKGQHPNTSSPNNVKVTYGGKDAPNTVKSWLKSQIDEEQTIELPATALRPGSRIRLNIRQGFSEKLKVLDLTLPSDFTFNKQLYFKGMGKKLGRWQGDLYLRFIPKRS

SEQ ID NO: 10562 - protein, 229 aa, Lawsonia intracellularis
MNILIFGPNGSGKGTQGELIQKAFGITHIESGVIFREHISKGTELGKQAKSYIDKGELVPDDITIPMILETLQIKGKSGWLLDGFPRNITQAQKLHEAMLKKGVKLDYVIEITLPREVAKSRIIGRRICKTNNNHPNNVSIDSIKPDGNNCRVCHGELIVRTDDQDEEAINKRHDIYYNTKTGTLSAAHYFKNLSDQYETHYILVNGQNTIEEIRKTLLEDLGISSEVS

SEQ ID NO: 10563 - protein, 422 aa, Lawsonia intracellularis
MKQQILRILVVLPFYGGSLPIGQYCTIALKDLGHCVEVFDSPSFWGSFTALKGLHIRNSKLEELEASFLQNISQAIYVKATEIEADLVLCLAQAPVTRQILKRFKRDNILTAMWFVEDFRLFTYWRNFAPYYDFFFVIQKEPFLEELASVGVANSCYLPMAALPTFHHPMDLSPMDQKKYGSDISFLGAGYPNRRVAFRQLTQFQFKIWGNDWDNDCFLRPNVQCDGKRISPEDAVKIYNGTKININLHSYIKHKPFVSNGDFVNPRTFEIASCEAFQLVDQRQLLSELFSENEIATFTTIEELKEKIQYFLARPEERFVIAERGRRRVLTEHTYQQRMRDLLSYISEHAVDWPKERAIMSLPDAVSTEYKEELKELFNKLKITTDSNFDDIIFAIRQESGVLSPIETSLLFLDEWRKLYKK

SEQ ID NO: 10564 - protein, 406 aa, Lawsonia intracellularis
MKRYLVIQLARFGDIIQTARLIASLLREGEVHLCVDKTLVELAEAIYPKCIVHGIIAHYSGVQQVIRDNYRVFNELHFLEFTEIYNLNYSGVNMAFATLFPSEKVRGYIVKDGQPVTEKWIKMGFRWTAQRKVSPLNLVDFWGMLAPNPVIPQDVNPVAKSGGKGLGIVLAGRQARRSLPPEILAPLVRIFFEHTSGKKIYLLGSKTERSIGRTLMSYLPSKLIEKTENLAGKTNWNELVEAVSDLDLVVTPDTGIMHLAARLGVPVCGMFLSSAWAWETGPYGEGHKVWQAVIDCAPCIESKPCNLNVKCLKAYSSPEFHKSIVGIKEQLSTTMACLESSFDELGLIWKNDRENTYVKSVRMAQRALLMEYQGITIASSKEFPEIADGRLAMNLYSEADWMLPDR

SEQ ID NO: 10565 - protein, 225 aa, Lawsonia intracellularis
MQYYPLFIDLTSANCLIVGAGNVGRRKLYSLIKAHTKHILIVDPLPPGQELKALLKEKTVCYKQRTFITEDILEKTLVFAATNDKKLNQSIATYCNLKGILCNIADAPSKGTFIVPSIVEKNGISIAISTNGNSPALSKKLRKDITEWLGDRYTPIVTLLSRLRPLVLKTSNITLDNTTLFNNILDSALSDAIQQKNRLQCEEILKNTLPNHLQIHIMELLHELV

SEQ ID NO: 10566 - protein, 296 aa, Lawsonia intracellularis
MSWSELLPIIIVHFYALGTITIVSGVLSQTKWLTRIAFWLIFLGVITHTALLILLWETPFSTFTQPVYMFILSWLIIFIALIIWIYCKYETLLLPMVPLALLIFLFALLLRHTKMPLPPALPGITFAVHITAMFLSIGLTSLGFGASILFLLQEKSIKKKIPLIGFQKDIPALTILDKINALSVMIGFPLFSIGILFGIVSARLTWGNLFVFDPKEVISLIAWCLYAWLFYQRFTHGWQGRKPAILAIWIFCICVFSLVVVNFFTETYHNFYVEKMLRRYGTTYLSYRHEPSYSKY

SEQ ID NO: 10567 - protein, 421 aa, Lawsonia intracellularis
MNHRTASIDVRECFALTEHCSKDDWAIPLIKGIQESLILSTCNRVEILAVGDSNTPEIILSAWAKVKTRSIEELVPHTYTYQGRSAISHLFCVASSLDSMVLGEPQILGQLKDAYKLATIAGASKTILNRLLHKAFSVAKRVRTETSIASNAVSISYAAVKLAKKIFGTMNQYKAMLIGAGEMAELAAMHLMQAGIQQLKIVNRTYSQAQELASQFRGEAIPFEKLVTYLAEVDIVISSTGAPQTIIHFNDIKNILSKRKHYPMLFIDIAVPRDIDPNVHQLDNIYLYDIDDLKEIVEDNIVQRQDEAIKAKHIIQDEIDSFCAWLQALILQPTIVDLRKRFSTYAEEELERTLKKIGPVDRKTREALETMIDALIRKLTHDPISYLKCAHRTIDTNHITLARQMFNLDKIPQTNKAVNED

SEQ ID NO: 10568 - protein, 435 aa, Lawsonia intracellularis
MGFFSSLKNALLSSNSKVTNSTKLNIELQPSTTTANNGWKEQLIISLRQAKPQLSLWLDLTLKGITHANEQLWERVTFLLVTLGVSENEARAFTQNFQQWSMDLGYTKLSDFRSELQYRLSLTLELEDEESEQNRLLTKIHTGLAKTREHLSQGLKTVFSHHKKLSNDFWDELEELFILSDMGVETAEMLTSRLKIRATKANISIPEELSPLLANELEIILKISPRVLAINPPEVILLIGVNGVGKTTTIAKLAYRMHLQGKKVLLAAADTFRAAAIEQLEVWAQRIGIVFYTKGTGADPAAVAWEAVEHAIQKQFDVVLIDTAGRLHTKTNLMDELSKIRNVIAKKHPGAPHRTILIIDATTGQNALQQTKVFKESTGIDEIIVTKLDGTAKGGVAIAVSLQYGIPITYVGLGEKMEDLQPFNGEKFAKALLNI

SEQ ID NO: 10569 - protein, 217 aa, Lawsonia intracellularis
MAYILPGSSLDADLYAITDDALSFNRSVIEVVKQLLDAGIRIIQYREKNKSSNSMLKDCITIKKLTEEANACFIVNDHVDIAVLCNADGVHLGQDDLPVDKVRELIGKEKIIGLSTHSPQQAQKAIEMGADYIGVGPLYPTKTKKDVCEPVTISYLDWVVSHIAIPFVAIGGIKQHNIQEVIQHGAKCCALVSEILSAPNIPLRIQELRQAILLAHT

SEQ ID NO: 10570 - protein, 475 aa, Lawsonia intracellularis
MTILHKKVGGVLSSGTPCLPVSNRICNFDEVAIGYTDEQAKIEASRCLQCKRPRCKQACPAQVRIPEFIAALLSGDLKEAYRIIRTTNSLPAICGRVCPQDTQCEGSCVLKAKGNPVCIGRLERYVADSILNMEVGLYVGLNEYDAKPPVVTHCKVACIGSGPASLTAAGYLIAQGIGVTIFDPCYEHGGILTYGIPTFRLPNTVVSDEIKALRSMGVTFSTQGIGDTLTIQHLFDEGYKAIFIGIGAGLSCQLGIPGEDISGVFLATKYLKDIKVNQSDKERLLSVQNNYLGRSVTVFGAGNVAMDASRTAIRLGAEKVHIIYRRTKSEMPARDEEIAYAEEEGVNIMELVAPVAFHKDKNNKLCSVTLQRMTLGEPDASGRRCAIPIKGELFEYTTDLAIIAIGSKPNQRLLEKIQGLKLTHEGYILTDEVGETSIPNVFAGGDIVTGAQTVVLAMDAGRKAAQAISKRLLEK

SEQ ID NO: 10571 - protein, 308 aa, Lawsonia intracellularis
MNETFTVYLAPHGFLQELIDEINTNIICSKGHLILVKGSPKKFAWAQNTWLSPRFIPISSITDGAKKLLSIQRNWWLHSENHHRRATLIQQQLPYVSAKKLHFGEIPPQTPLGSWTLWEKDIILASPDCSSVFPDGVITFHENKIEPPSRAYLKLWEVFTRFSFVPSYKELCIDLGASPGGWTWVLAKLGSSVISIDKAPLASHISSLPNVEHYTGSGFRFTPLHIGNVDWIFSDMACYPNKLYNFIQPWIINKNCHTIICTLKLQGKPSNSTLSCFKKIQSSYLIHLSYNKHELTWIYSTKYPLVML

SEQ ID NO: 10572 - protein, 308 aa, Lawsonia intracellularis
MESYLAIEFLNKLTLSIGFPLFFLLASALLPIIVCFTIVFGIVKQSKLYIQCAYQLMYLGVILTSIFVLILLLVTGIYYSDIQHFLPIYQYIFWVTCSIFYLGFIFQLICIVLWYRLIGSPILYILLSFLSGICYSSFIIISIFLFGYIFSGDFVALERETDFSIIVGLIFPSLTSPLWLIVFITHFIEAAAAAGIALVWLWIRRNKDNFGRDYYVVAANWCGVWAAYGAWIFLISFIVFMLYNVVISLIVIGWPIATVSVGLGLISALIWTKIALSNNPMRHKLSMIFAIVFFVYSMTFGSSVVFIQ

SEQ ID NO: 10573 - protein, 149 aa, Lawsonia intracellularis
MSSIKEQIETFLLDLSSGSEEKLLVELWRNWSMVMGPYLEGIAYPLGRREKTLIVGGEDTMALQELAYMKEELLERVNAFMDRTFFDKVDLQLCMGRQLVYKKQVNQRNIPRKLKIPRQHAAEQSDSLVLDSNSPISRCYKTYLRMGDT

SEQ ID NO: 10574 - protein, 685 aa, Lawsonia intracellularis
MRYHTHVSDQTLQAIQNNEWLETNILGDYSSSTLSFKNTRKYHGLLIANLEQPHGRHLLVSTLEDAIITNDITYEISSREHENIVYPDGLKHLISTGITYCPQCIYTLDDIQICREIMLLGDQNTTLVRYTLYGANNKRHTLRIRPLLAFRSIHKLSTANDILRKDVETVYNGFSIKPYESLPTLFVQSFDPHSFIYTPNWYYAIEYPIEKERGYPYKEDLFVPGELHIDLQPYAPVIISFSTKLLTTTENPIILWNNEVIRHQQINSSEHSITTTLYNAGEQLFTTISKENSNIVAGYHWFDSWGRDTCISLPGLSFCTNNIELGKKVIKTAIDSMRYGIIPNIFGGNDKSHAFNCIDTSLWFIWAIQQFMLTEPQQQEWIYENCWSAIKSIITAYRDPTISGCTIDESGLIAAGTPITQLTWMDASINGIPVTPRNGYPVEINALWYNALAFSGYLAKLYKEPFDTYYQPLDTMRQAFKERFLTKGIYYYLGDVWNNNLLDTSIRPNQLFAISLPFPILEKEYHADVLRTVTTTLLTPYGLRTLDPSNPAYKGICEGSQEERDKAYHQGTVWPWLLGAYGDALLQSAAFPELALQQLLFFLTPLFTIHLEEAGIGFISEIFDGDSPHLPRGCIAQAWSIGECIRLLYRSEKEFPTVFKTWKNYLASYKEAPLYDTTTLTRYLK

SEQ ID NO: 10575 - protein, 446 aa, Lawsonia intracellularis
MRILMFGWEFPPYLSGGLGTACYGMTQALIRSGAKIVFILPRSEHSSRYVEQNKHFPKIRSAADVCITQHKQLGYFTQQFQEIWKKNFSIRPIKATLHPYVSFSQTLSAYYSTQNHLTEHNEFSTVSSACALPPCSGGYGPHLMEEVFRYSQAAAQIAMEEMYDVIHVHDWMTYPAGIIAKKISNKPLIAHVHATEFDRCGDSPNQDILNIEKVGLERADHIIAVSHYTRNLIMKKYHIPGEKISVVHNAVLPASGNYTWQKKRNSNKKYVLFLGRVTHQKAPEHFINAAYLVSKKLQNVCFIMAGSGDMLPSMIRKVASLRLGSRFHFTGFLHNQQVEHIYSLSNVYVMPSISEPFGITPLEAIRHGTPVIISKQSGVSEVLKSALQVDFWDIERLAHLICSLLTYPKLEKSIMGLAYNELQSIRWENSAQQLCHIYSKFNKNGQ

SEQ ID NO: 10576 - protein, 428 aa, Lawsonia intracellularis
MPSICFYFQVHQPFRLRNYSFFEIGVNPFYEDEEHNRHVMHKVARGCYLPMNRLLLKLIHQYDQKFKISFSISGTALEQFERYSPEVITTFQELADTGCVEFLTETYYHSLAFMFSPYEFKEQVTLHQQRIKELFKITPHVFRNTELIYTNELAKCIENMGYIGILAEGADHILNWRSPNYVYRPLGCNNLKLLLKNYRLSDDIAFRFSNKDWIGYPLTAERFTQWINDSGGSNETINLFMDYETFGEHQWADTGIFAFMEALPHYLLQSNNQFLTPTEVATTFTPVAELDIPYPVSWADTERDLTAWTGNEMQQDAIERLYRLEPLVREYGCEQILNTWKRLQTSDHFYYMCTKWFSDGDVHKYFNPYPSPYDAYINYMNILTDLESRITLQPNSNTYSNQHTMKAHYNDVTPLLSPTTCFNNLQNL

SEQ ID NO: 10577 - protein, 1420 aa, Lawsonia intracellularis
MQQAVEQTTLFEVSWEVCNKVGGIYTVVTTKVPQAIKTFGDNYYLIGPNLGNNADFQETDEPCWETLSQSLAIRSLHCRFGRWNIPGNPKVILVNFKDRYNQNQLLYEFWNRYGVDSMTGGWDYIEPVMFGSACGEVINIAVKTLVEPVGGTAVAHFHEWMCGSGLLTIKQLAPDVGTVFTTHATILGRSMAGAGIDIYENLSQINPQREAAAYNITAKQSMESITAREADYFTTVSEITADEAEAFLGRRPDIITPNGLDLHIIADFSKDTSLTTTARQSILSRASQFIGQQLPNDTRIMIISGRYEFHNKGFDVFLDALGNVEQALRNSNKYVLALCTAIGGHTGVTKYALENHLESNMITPPMPLRIVTHHVYNIEQDPIITKCLRLGLTNHEEDHVKIIFVPALLNGQDGFFNMQYEQVLPGCDLGVFPSWYEPWGYTPQESAAHAVPTVTTDLSGFGMWVRKLQENNHVTDGISVIHRLHMPYDDTVNALQSVILEYATCSSEKLMQHRIAVRKVSEECSWEKFFPYYIQSYHSALAKANERISIHEPQKQTNTLVITGVSKTPNLRMLTAINQLPQKLGRLREVVNNVWWTWQPEAETIFTLLSKELWKQSGHNPLKMLEDICPAALMAAEKNTEIQECYNELITKFDEYMKNKPHTTDPSISSYHPIAYFSTEYGLHESIPLYSGGLGILSGDHLKAASDLNIPMVAIGLLYKNGYFQQRIDAQGNQIAMYPENNFSLLPISLVKTLQGDPVRIELDLFPGRQLFAQVWKMQVGHVPLYLLDTDIPQNILDDRRITARLYESDRDCRIRQEILLGMGGVRLLNLLKIMPSIYHMNEGHSAFMILERIRNLMLWFNLPFNTAQECVRGNTVFTTHTPVDAGNERFDPSLMEKYFSDYAKSVNLTWNDFMSLGRFSTNDRNMFEMTLLAIRNANKVNGVSRLHSQVSKHMWANNWKGLPVPEIPIGYVTNGVHIASYVGEHTRKLLKKYVHELWDSLPTSHEAWKNVAQIPDEELWKARLEQKQPLLNVIKHLAMSSNLSYKIFAEEQQSIIQQLSEDVLIIGFARRFAPYKRANLILANPDRLHHILNNPQKPTILVFAGKAHPADQQGIDLIKQVINYTKDPRFYGKIFFIENYNLAIAKILLQGCDVWLNTPRRPYEACGTSGQKVGANGGLNLSIADGWWCEGYNSHNGWTIGKEIVDILPESEQCDYSDAESLYSLLEESVLPLYFKKDTNSFSPSWIAMVKNAMQTLIPEFNAERMLHQYLDDYYLPLAKNQVTFRGDNFAIPKQITKWKQGLEQRFATIKIRNVQIEGLTEDTVLYGEPLTITVTLSPESMKVDELLVQLVIGPGKDNTFTEMPDVLTLMVSQQSGKEVTFSGVYNIKYNGPNVYGIRILPTMPGLLSPYETGLILWV

SEQ ID NO: 10578 - protein, 296 aa, Lawsonia intracellularis
VDMEKARLRSHMLIESLPYLQKFQGKVIVIKYGGHAMKDTLLKQSFAQSIALLNLVGIHPIVVHGGGPQIGNMLSRLNIQSEFREGLRVTDKATMDVVEMVLAGSVNKEIVNQVNQAGAKAVGLSGKDGAFILAEKNDLILTKENQPPEIINLGNVGRVVHIETSLLYTLIEKGFIPIIAPVGTDNKQTYNINADEVAGAIAGALKATRLLLLTDVEGILDLNKKLIQSIYLEDTPKLFSDGIVFGGMIPKLQCCIEAIEQGVEKVVILDGRLEHSILLELFTDQGVGTEIVKKPV

SEQ ID NO: 10579 - protein, 433 aa, Lawsonia intracellularis
MNELTPREIVVELDKYIIGQEQAKRMVAIAVRNRWRRQQLQEGLRDEVAPRNIIMIGPTGVGKTEIARRLAKLCHAPFIKVEATKYTEVGYVGRDVESMIRDLMEISINLVRKEEAEKVRERAEVLAEERLLDLLLPIGENRDATREKLRSLFRQGHLKDREVDIEVQEQTQPIGILNVPGMEQIGNQMKDAFSRIFPQKTHRRKMKVSAAWEHLVGEESNRLVDNDKLTDLARERVEQMGIVFIDEIDKLASASQHRSSDISREGVQRDLLPIVEGSAVNTKYGLIKTDHILFIAAGAFHLSKPSDLIPELQGRFPLRAELEALGKNEFYRILTEPDNALTRQYEALLETEGVKIVFTDDGLKEISAFAEDVNTQTENIGARRLHTIMEKILADISFDAPEKFGTTLEVTKEYVVSYLEDIRANTELSRFIL

SEQ ID NO: 10580 - protein, 235 aa, Lawsonia intracellularis
MFLEVNDLHARYGAEEVLHGVSLYANEGEIVSILGANGAGKTTTLLSISGIVKVTKGSIVFRGKDLSSLPSYMITRQGVCQSPEGRRVFGVLTVFENLQLGAFTIQDKNLIRKTLDWIFELFPRLYERKEQLAGTLSGGEQQMLAIGRALMGQPRLLLLDEPSLGLAPLIVKSIFNAVQHINKLGVTILIVEQNARAALKLANRGYVLELGRIVIEDTAKNLLGNPEIQKAYLGR

SEQ ID NO: 10581 - protein, 253 aa, Lawsonia intracellularis
MTLLSLNNVTKFFGGLIAVNNVSFEIKQGSIIGLIGPNGAGKTTIFNLITGNSIPNKGEICFAGQSIQGMKPYAIVNLGIARTFQSIRLFPYLSVIENVLIGRHCRMQSGFFSCMFRFSSQRQEEQAAIERAISELEFVGLASYSIDQAKSLSYGNQRLLEIARALASDPKLIILDEPAGSMNDPETNVLIKLIHAIKERGITILLIEHDMHLVMNVCERLLVLESGTLIASGHPENIQRDPRVIQAYLGQDD

SEQ ID NO: 10582 - protein, 328 aa, Lawsonia intracellularis
MSRIRRYCSLLLGVCIAILPLFLNNYWIDVASNVGLYVLLALSLNVILGQTGIFHMGHSAFYAVGAYFTAICNTYYQIPILWLLPLAGFTTAFFALIIVRPILSLRGDYLLIVSIGIVEIVRIALTNDICGITGGANGIFGISRPTIGDIVIRTTTQFYYLIWGIVLLTMLLFSWLFSSRYGRAFNSIKEDEVAAEGSGINIIHYKWLAFVVGAFWAGIAGNLFASKMTVISPTSFTIWESVIIFVIVILSGGSQLGVILGTCFVIALPEIFRSLADARMLIFGLAMMIMMIVRPQGLLPPLPRVYNIRNLLHKKHSDFGSPIAPRQN

SEQ ID NO: 10583 - protein, 300 aa, Lawsonia intracellularis
MIEFFQQIINGVAIGGIYALVALGYTMVYGVLKLINFAHGELFTIGAYIGFTLLFSLGLSTLAEPIAIGLVMFTIFVIVAFLGVLLERTAYRPLRKANRLSAVVSALGASIFLQNAIMLIYGGNFYVYPETFFPSLSLDIFGVHISFMRLIIISISFFLMVTLYFFVNKTSIGMAIKAVAIDQITARLMGINVNKIISLVFFIGAGLGGIAGVMVGMYYGQISFTMGWLYGLKAFTAAILGGIGNIPGAMLGGLLLGVVETLAASYLSIGWKDAVAFFILIIILVVRPTGLLGERVADKL

SEQ ID NO: 10584 - protein, 374 aa, Lawsonia intracellularis
MKKWLRILLLAICVNIFVGNAFCEEVIRIGLMCPLTGKWANEGQEMQNIVKLLAENVNNLGGVNGKRVELIIEDDASDPRTAALAAQKLVSSGVVAIIGTYGSSITEATQNIINEAGIVQIATGSTSNRLTDKGLPLFFRTSPRDSDQGIVAADVISQKGYKSIAILHDNSSYAKGLAQETRRELEKKGSSVVFFDALTPGEQDYTAILTKIQTTNPDLIFFTGYFPEAGLLLRQKSEMNWSVPIMGGDATNNTDLVKIAGKQAAKGYFFLSPPTAYDFNTPEAKAFFMEYKKQYHKLPSAIWPIFAGEAFNVIIEALKQGKDSPKSIAFYLKHTLKDFPGLTGPISFDEQGDRIGNFYKVYYVDEQGTFILEK

SEQ ID NO: 10585 - protein, 325 aa, Lawsonia intracellularis
MLIHCPQCHFYRELNTSQIPDNAVMATCPKCQTRFRFRNLDSEYVDPSSSNTIHLLQQAESKTFTNPPTNNTSISHSDTECLKNSSSEYNQQNNYKNVLEKLKKYTLTNQTRQPTDGYVDLIPWEHPEKFDFFSSFYQTIVRVMFNPATFFGNISNATSSLLRPLFFYILVRLFQTLMDGMWFMVSFQALEPSITESSLHDLLSSIAQEMTIPMTLIMTPVTLALQLGIYVLLFYLMIRFIQPEQTYFHTIFRVIAYSAAPTIVCIIPIIGSLVGSIWFSISCFIGCKYALKLSWTKTALALIPLYLIAMAIGLQGAKQFIHIAG

SEQ ID NO: 10586 - protein, 234 aa, Lawsonia intracellularis
MRIVVLLCVIQLCILGTACDLTSTGKALRNTIHINSYGQAEVILDNWINTSQIQVYVYPQSPPVEPTKVLFVPFRVTQQMENFLTVGNNISRIIWQNWLQNSIFSTLEFLQNGTAFRPDVSLTIAKQKGANLVVGGYITDFIDGGLSGDTRVSIAIEIYDVSTGNLIWSLSQAGSIQAASVNDFIIFATKTRMPTNPSAAVINLLAEDMGKKIKEWTNPSFQEETWLMPEPLAF

SEQ ID NO: 10587 - protein, 233 aa, Lawsonia intracellularis
MEECSPIDLLSTKETWRLFRIISETVDGFEAMSKAGPCVSIFGSARAKPDNPLYKETEAISKLLVSAGFGIITGGGPGLMEAANKAAFEAGGRSIGLHIHLPHEEGCNNYLTIRTEYRYFFIRKLMFVKYAQAYVVMPGGMGTIDEFSEAFVLTQTKRIHPFPIILYNSQFWNGLVDWMRQTMSKEGFIEPSEIDALLNICDTPEEVLKIIQEKVPTAITHKKNKHKQLHSYP

SEQ ID NO: 10588 - protein, 162 aa, Lawsonia intracellularis
MCWGPIPTPPLGWTWDNLMDEALIEANQCTKKNEVPVGAIIVHKNGKIIGKGHNAPITTSDPTAHAEILALRTAGAVQQNYRLQDCFLIVTLEPCLMCVGAIIQARIDGIVYGAAELNTGSITSCIAGFDLPFNNYKPWHMGGIKATQCSQLLHNFFYKLRK

SEQ ID NO: 10589 - protein, 95 aa, Lawsonia intracellularis
VAKSAEEITIEYEEAGQILVKELDKVILSKGAWTTILFRYQEFDPETGGYGPEKYSIRRYQKVAGEYRQKSKFNISSIEQAKKIIEALTHWISES

SEQ ID NO: 10590 - protein, 263 aa, Lawsonia intracellularis
MWNAEKVKQLAEWYVSPQGSFALEQEYKLFQNLISIWPRRDYTLLNIGCGVGAFLEMFWDYGFDVTGLDNNLEVLELSSNRLKNRAEFQLGALDDLPFEDESFNYASLVTILEYVEDPKKILAEAFRVASDGIIVGFTNKWSINHIINSTLQLLHKKPKKDSQWVSPWQLIRLTKQLYPECRIYCRSTLLGPKRTWDVTSSWSKLNRIILSFPIGTYVGMRIEKRPKPTLTPLLLKAKEQAVNVYNALSPEATSTIQHNRTNK

SEQ ID NO: 10591 - protein, 474 aa, Lawsonia intracellularis
MFCKLKVIICITLMFIITVVPTIAESALPNFVPLVKDASKAVVNISTEKKIPRGRTEFPMEMFRGLPPGFERFFEQFEPKGPDSQIHKQRSLGTGFIISSDGYIVTNNHVIEGADSVRVNLEGTSGKEESLPAEVIGRDEETDLALLKVKSKDSLPYLIFGNSDTMEVGEWVLAIGNPFGLGHTVTAGILSAKGRDIHAGPFDNFLQTDASINPGNSGGPLINMSGQVVGINTAIMASGQGIGFAIPSSMADRIIEQLKTNKKVSRGWIGVTIQDVDTNTAKALGLSQAKGALVGSVVPGDPADKAGLKVGDIVTQADGKQIDSASSLLKAIATKPPFSVVKLKVWRDGKSKDISITLGERKTTSSQKQSSPESLPGALGLSVRPLTQEESKSFDVKLGIGLLVVSVEPNKPASEAGIREQDIILSANLKPLQSADDLANIICGDAKKKGVIMLQLQRNGQTFFKTLSLTEDSN

SEQ ID NO: 10592 - protein, 804 aa, Lawsonia intracellularis
MKKFFLNIVIFCFGIILLSIIGLIGLYFWVSRDLPNITKLNDYRPALVTTVLARDGTLIGYIYREKRFLIPLSEMSPFLPKAFLAAEDAEFYEHEGVNPLAIIRAFLINLQSGTTRQGGSTITQQVIKRLLLSPERSYERKIKEAILAYRLEKYLSKDEILTIYLNQTFLGAHSYGVEAAARTYFAKHAKDLSLAECALLAGLPQAPSRYNPYKDPEAAKIRQRYALRRLHDVGWITQAEYEEALQEPLYFSSMKEGLGAESSWYMEEVRKQLVSFLSKENISQYGIVLPLYGEDALYELGFTIQTAMDPQAQLVAYDVLRNGLENFSKRQGWKGPIEHISSTMIQHYLENATFTPEKLDGGAWAKAIVSKVSQEGAEVFLSSIYKGFVSVETMGWARKPNPEVRSAYCAPIKDARSVLNPGDIIWVSGVGPDSTHRYSSKTLDTSKPIPLALQQLPQIQGALISIEPNTGDVIAMIGGYEFGKSQFNRAVQAMRQPGSAFKPIVYSAALDHDYTSATMVLDAPIVEFMESGDIWRPGNYEKNFKGPMLFSNALALSRNLCTVRIAQSIGLPAVIERAKALGFNGNFPEFFSISLGAVEVTPIRLVNAYTAFANGGNLATPRFILSIKDSNNTVIYRQEIEQHPVISPQNAYIMASLLKNVVNIGTARKAKVLERPLAGKTGTTNGEHDAWFIGFTPYLVTGVYVGNDHPQTLGKDGTGAVAALPIFTEYSKVVLKKYPESDFPVPDGITFASIDTQTGNRATANSTNSVVLPFYVGTVPEYFDSKDNEVNTIERGEDLLKQFF

SEQ ID NO: 10593 - protein, 502 aa, Lawsonia intracellularis
MMGSLFIGATGMKTHSTGLGTVSNNIANANTIGYKQQQVVFQDLFSQDLAIGSTGSQGPNQAGMGAQVGSVRTIFTQGAFEPGNSVTDLAIGGKGFFQVTLEDKVHYTRAGNFRFTQDGFLNDPSGFTLMGSRISNNPNIKKETLEPIQLDFNDPTVAKSPAKTSTALNAVVNLGDSTDKTQSEANPYFALLESWKGNGTPPISTSNYSYAQPMRVYDQQGNSHDITVYFDGAPSSTGSKTFEYLVAMNPSEDGSAASGTDSAGLLMSGTMTFSSNGELKNMTAFTPTGSATKDLNAWQPAPLVNGLPQFSANFVGAGIQPLTLDFGIKSQQNMWAGAPASAAAIGTDIGKLPSMMPIQTSSGNSTARNGSSSTRRYSQDGYPQGDLVDVTITSEGKLQGKYSNSQVVDFYNIPLARFTSEDGLRREGNNHYSATLDSGGPEFGLPGTSNYGKLSVNQLETSNVDMSREMVNMIIIQRGFQMNSKSVTTADTMLQKALELKR

SEQ ID NO: 10594 - protein, 298 aa, Lawsonia intracellularis
MQVVTNTDLKEFPLYSRGKVRDIYSIDQNTLLIITTDRMSAFDVILQEPIPYKGIILNQLTLFWMKKFQHLVPNHIIESNVDNFPSNLEPYKNLLEGRSVLVKKTTPLPIECIVRGYISGSGWKDYLTTNSICGYPLPPGLKESEKLATALFTPSTKADLGQHDENISIETTEHLLGKDTTTLVASLSLLMFNEASVWAEDRGIIIADTKFEFGILDGQVILIDEVLTPDSSRFWPTKNYIPGKSQPSFDKQYLRDWLETQLWNKTSPAPNLPKDVIQTTYDKYHEAYTILTGENIGI

SEQ ID NO: 10595 - protein, 254 aa, Lawsonia intracellularis
MLLKNKKCLILGIANNKSIAYGIASSFKEHGAKLAFNYVNDAIQKRVEPISQELNGDFIFQCDVSKDDEIKEAVKLVQKEWGHIDVLVHSVAFANREDLTKRFIETSRDGFHLALDISTYSLITLCHAFEPLFVHGSSVLTMTYYGAQKVIPHYNVMGVAKAALESSVRYLSVELGEKNIRINAISAGPIKTLAASGISDFKKIFNHIEEHSPLKRNVTIEDVGKSAVFLASDLSSGVTGEILFVDAGYNNLGI

SEQ ID NO: 10596 - protein, 439 aa, Lawsonia intracellularis
MALVTKEEVLQYHSEPRPGKLEVFPIKPCKTQKDLSMAYSPGVAEACLAISEDKDTSFLYTDKANLVGIISNGSAVLGLGNIGPEAAKPVMEGKAILFKQFADIDCYDIEIKATEIDHICEVIKALEPTFGAINLEDIKSPECFAIEERLKNEMNIPIFHDDQHGTAIISSAALLNALEIANKKIEDIRMVISGAGAAAIGCGRLFKILGVTPENIAMFDSEGHINVSRTNLNQEKKEFATQKTYTTISEAIDGADCFIGCSVPGVITERMVETMAKTPIIFACANPVPEIGYNEVKSIRPDAIMATGRSDFPNQVNNVLGFPFIFRGAIDTYATTINTEMKIAAAYAIAALAKESVPESICMAYNVKNLKFGPDYIIPKALDLRLLEWVAPAVAQAAIASGVARKELDIANYALTLHKRLSAAHKRQELLLNSYGFYS

SEQ ID NO: 10597 - protein, 105 aa, Lawsonia intracellularis
MRKFETLLLLSPELSPDAREALLVKLVSIIEKNKGQFTVNHWGMRDLAYPVQKHMRGYYVLLEYTTYPNIIEELERIIRITNGIFKFMTIKLEEHIEEKQLEEVV

SEQ ID NO: 10598 - protein, 173 aa, Lawsonia intracellularis
MKVILRSDVENLGRLGDIVTVKSGYGRNYLLPQGLAMLVTPGNMKVFELEFKKLQERMNDIRSKADELAKRISGLIVTVLMRAGDNDKLYGSVTTSIIGHALAEQGIDIDRRRILLDAPIRTLGQHTVRVRLHADVIAEFIVNVASEEKLYDDTPDRTETEESTKELQEEHAE

SEQ ID NO: 10599 - protein, 454 aa, Lawsonia intracellularis
LLRRVPPHNVEAEQAVLGGIFLRNTVFHTLIDIVRAEDFYIPSHQILYTTFCELYRKSAPIDLVSVAAFLNDQGLLEQVGGASYLAELAQTVVSGANAEYYATIVRDKSLHRTLINACSTIITNCFDPSCNVDSLLDESEQTIFSISERTVGKAFKSSKDLISNVFQELEKRFERKEQVTGITTGYNRLDKLTAGLQPSDLIIVAARPSMGKTAFSLNMAMRSAIQQGTPVAIYSLEMSMNQLMMRMLCAWGKVDLSHLRHGYLNSDEWSRLYHAADVLGQAPIFIDDTPALSPLELRARTRRLKIESDVGLVVIDYLQLMRGNKRTDSREQEISEISRSLKSLAKEINIPVVALSQLNRKLEDRTDKRPQLSDLRESGAIEQDADVIMFIYRDEVYHKQQDNAKKGTAEIIIGKQRNGPIGTATLAYLANYTAFEDLEPGLSASPSETYSNIA

SEQ ID NO: 10600 - protein, 196 aa, Lawsonia intracellularis
VGKNITSERLAKIKHVLSLRQKNLTLVLANIHDPHNVSAIYRSADAFGIDTIHLYYTDTPFPKLGSKSSASAKKWVKTIYHQSANKLIRMLKEDNYKVIATSCTSQAQPLLSHNFTGSTAIIMGNEHAGVPPELTGLVDSELYIPMYGMVQSFNVSVAAAIILAEASRQRLSAGMYNTPTYTETEFATNLSLWINK

SEQ ID NO: 10601 - protein, 665 aa, Lawsonia intracellularis
MKITIQNFSKSFGGQDIFSDFSLDIDSGIRLCVSGPNGCGKSTLLRIIAEVDIPDSGRVIIPKGTRIGYVEQELAPSALDVSLLTWVLEVLPDWHDFWATWEEAIQANDSKKLSELSLKHTELETLYGYHPEYKAKEILSGLGFTDNMFDLPLSKLSGGWRERAKLARVLVAGADVLLLDEPTNHLDIESVEWLEEFLREYKGILIFVAHDRVFMDNVGTHILYLGGLKPVFRKLTFSQFMVLREEIEEQKARETQRITDEIERKMEFVRRFGAKATKARQASSRQKMAKKLEQELEEYKPEIKRKELKFIWPTPLKADKVILSAAALSFSFPDGRQLWPSLTFSLLNGQRIALVGPNGCGKSTLLKIIAGQLKSTGGSLTLGSGVRLGYYSQHQTEILNTSGTVLGEIRRLSDPKMTEEELMSVLGLFLLGQGYFDRTIQMLSGGEKARLVLASLFLNKANFLVLDEPTNHLDLESREALVNALSNFSGTLLVVAHDRYLCSNVTDEAWALSSEGLTRYEQGFLQYDEARKQGLKQVTIVETQDNQKNCLTQKNKKNSVISYSRDELKSLKREQAKKRNELYNTIKPKQIAYKRLEEELSILLEKQHNLEQLLATPAGHGSGIETAKLLKQFSEVKDQTDRIIDKLEKLELEINALEQQRIAIS

SEQ ID NO: 10602 - protein, 289 aa, Lawsonia intracellularis
MPAYGDLVCIITPRGKSKLYRIEKNQDIHTQDGILKVDDIVHASYGTEIFTTLGTPCCIQRPTINDIIRNTKRQTQVLYPKDISYICIRLGVGPGRTVIEAGTGSGSLTMALSWFSGPTGHVHTFEAREEFYTLAKHNLQWAGLGDNVTMHHQDISEGFGQVTGADALFLDVRTPWEYLTFIPKAVSPGASLAFFVPTTNQINELLLGLDNGPFDNIEICEILIRHWKPIIDRIRPEDRMIAHTGFLIFARHQEHSSSWNKYKILGTRERKQEAARNKRMKADVQHIDE

SEQ ID NO: 10603 - protein, 670 aa, Lawsonia intracellularis
VKKFFIILFVIIILLISGIAIFIYTNKDKITLAISKAVESATGQPLYTDSIPSLSFFPTPGIELGKSSWGNPDTNEISVELIKCVFRFSLLKLFTGTIAIDEIFFEQPSIIIQKKNAQNKKIQSTAAVTSTNAINPQEDKKASFQLPEISISSVTIKDGMLKFFDGRKQIILTGLQLTAKNIYPQSTGKISIHTQALFQPENISFVTEGNVSIILDKNILSIEHIKFIINPKTGLTVSTPITIEGNGRYLFDKNLLEKSDIQVKLDQFKINANGSLELNKLQGTAVINASGSLKKLASTLGMMLITPETKIFENFSAQSKVQVNGQYIQLTDLKIMLDDSQVTGKLALNLPNKLSGNLSLTTINLDQYLPISFAKHTPVTKNLIQTSSVTTAQHTIKNTQQQTISSSLPTLDLKLTADSIIISKLHIEKLNSQLHGNPSNYVLDPCTFIFYESPISVKGKGNLTASNPRYEATITGSHINLTSLLSDISKTAIIKKGTVDLSAEITTTGSNSIQLKQTLNGKATIEGKDINIQFGALPVQSPELTRISQQPFTELNGKLKAVNGTINIEQFILKGTPVAAAANGSILLPNNTMKINVDIAVKDTVIPLHIYGDLSNPSYRVDPARLLQGAITKILNKKEKDIFDKLPLPQNAKESIQNTAEKVFNKIFGR

SEQ ID NO: 10604 - protein, 457 aa, Lawsonia intracellularis
MKLSHKIRPHSLTRENISRLTDYTAVAISLNHLKNNKDFIHPADIAEYLETLSTEKQLSLVQNLPVEEAAEALAELSEDVAGDILEHLDPADAAKIISEMSPDDATDVLDEIDKEHRDALLDNLVEKDAEELRKLLSFDPNTAGGIMNTEVSMFKQDITVDEAITQIRTTIEYKEIIYYAYVIDEESRLVGVLSLRDLMLLKPGTVLQHALKHQDLIVAYYDTDKHDVAKEISHYNLMAIPVIDYEGHLLGVATYDDIIDIIQDEASSDLLGMVGAGQDETVDTPWYVSVFMRLPWLIVNMLTSALSAFVVYLFEGSIAHMAILAVLMPMVANQAGNTGQQALAVMIRQLATERFEVKRAWLAVFREGKIGITSGLIMGLFVSVIVMWMTQNVVLGCVMGGALMTDMVAGSLAGGAIPLFFRYIGRDPAQASSIFLTAITDSFGFFIFLGLATLFLL

SEQ ID NO: 10605 - protein, 296 aa, Lawsonia intracellularis
MHCPTFSKYFQGKPYNLLITMLKLALEEDGIDFTSKGIFSSTEQIHTQIIAKEQTCVSGLPVIPIIMQLSSLTHNDYVLNILVDEGQEVPINTPIAEIIGPAFTILQTERTILNFISHLSGITTTTKKYVNALKGSDIILLDTRKTLPGLRYPDKYAVLCGGGMNHRCNLEELLLIKDNHIDKAGSLTNAVKSLRNTYNPCPPIEVECRNHSEVIEAVECQVNRIMLDNMSIDTLCSSLMVIPKSIQVEVSGGITLNNLKNIVTSQYKPHYVSVGCITNSASAADFSMRVIREKRV

SEQ ID NO: 10606 - protein, 351 aa, Lawsonia intracellularis
MSRFLNKEEKSKHITSLKSSLGNQVSILGHHYQEQGVIDHCDYTGDSLELAQRIAHLDSEHIVFCGVYFMAESAALLAKEEQSVYLPEPAANCVMSLMSPAYLIERLFKKLTASGRKLIPVAYVNTEVDVKAIVGKYGGATCTSSSADKVLKWALNEGDGVFFLPDKNLAYNTAKNIGIPKKNLHILDIRKKGDVADLEASKQADIIVWPGLCAIHARFLMQHIHLARENYPNCTIVVHPECTPEVVKASDAVGSTSFIINYAKNAPDGSHIVIGTEINLVSRLKNEHKHRIKTTPLRASACSHMAKCNPDKLYTTLHSIANNNATPISIEQETKTFARAALERMMQIITV

SEQ ID NO: 10607 - protein, 527 aa, Lawsonia intracellularis
MNQHRYYSQVLIIGGGIAGVTTALVLADAGFEITLIVPSKELDGGNSQLAQGGIVFHSQDDNKQLENDILNAGHQHNYLKAVRFLCKKGPEVVHRLLIERIGIPFEIDKQKGTWSVTREGGHSSARIIHCADHTGKSIMEGLLKEIQKTSNIQILTHRTAIDLITTHHHAKLKEYRYNPENQCLGAYVFNEQTNEVETLLADWTVLATGGIGQIYLHTTNTEASIGSGIAMAHRASVKLTDLEYIQFHPTALYSCNKTQKFLITEALRGEGAKLTNTQGKAFMKKYDTRAELAPRDIVARAIMEELLHTGEQCVYLDLSNVSHDITKRFPTIYNYCYQQGLSIKNSPIPVVPAAHYFCGGILTDTQGQTSLSRLFAVGECSCTGVHGANRLASTSLLEGLLWGYSTGLHISRKKNKKNFLSTRIINAIPNWECTGNEKNDDPALITQDWTSIRHIMWNYVGICRTGSRLKRAFEELRDLSRHLHDFYKNTPISKPIIDLFHGSQTAYIITQKALLNTKSIGCHYRIN

SEQ ID NO: 10608 - protein, 101 aa, Lawsonia intracellularis
MFVFGNILLGIARVLDIILSLYFWIVIIAVLLTWVRPDPYNNIVRMFYALTEPVFYKVRKFLPFTLVGGLDLSPIVVLIIIQLLQTIVVRSLFQYAGMLEG

SEQ ID NO: 10609 - protein, 224 aa, Lawsonia intracellularis
MSYNNSLFNQVKNIFPQGIVGIIFDCDGVIIDSKSINVGYFNKILQELGYPNMTKEEADYVQMASVQDAMNFLIAHEDREKLKEVTQRFSYKNEVLPHLKIEPGLMNLLHWLKSRGIQLGINTNRVSKGINDVLLSLDLNGFFDPIITSDLFPAKPDPEGLLTILEIWNTEPSKVAFIGDSLTDEGAARAASIPLIAYCNTSLSASIHIEKFSDLYDALQGLYQ

SEQ ID NO: 10610 - protein, 240 aa, Lawsonia intracellularis
MYIRYVVLVIMLVYLPGCGIIDYFAVPRPEQTAQELYENAKDAMEEKHYAQAAEYYEKLKDNYPLSPYTVEAERALGDALFFDEKYAEAVEAYKEFETLHPRHPDIPYVLYQIGMSNLKTFISIDRPTTSIQEAYEYFQRVQETFPDSPYAEAAVNEMKACRLIMVEHELYIANVFWNMGKYGPAWKRYTFILENFSDVPSVSEYTKERSLAAYFLYRKQESQAEREQIHGSWKRLFNWL

SEQ ID NO: 10611 - protein, 308 aa, Lawsonia intracellularis
MKQYDSIVVGGGPAGLTAALYLCRSGLSVALIEMLAPGGQLLKTEEVTNYPGFPLGIKGWELADFFSAHLDGYTLTRYNDNVTSFIHTPGENKLTVGEKDIIGKSIIICTGASPKMLGLQRESELRGRGVSYCALCDGNFFRDQVVAVVGGGNTALEEALYLSRIVKKLYLIHRRDKFRANKHYQDKIMATTNKIKLILDSRITMLHGESELEALEVENVKTQVISKIEVSGLFIFIGYEPKSDFLPSELALDASGFVLTDSEMRTNLPGVFAAGDIRSKQCRQVVTAVGDGATAATAAFSYIEQLDV

SEQ ID NO: 10612 - protein, 107 aa, Lawsonia intracellularis
MAAQVTDTNFDTIVLKSNKPVLVDFWAPWCGPCRAIGPIIDEIALEYASDIHVVKLNVDENTITPGQYGIKAIPTLILFKNGEVVEQLTGAVSKTSIITMLKEKALS

SEQ ID NO: 10613 - protein, 355 aa, Lawsonia intracellularis
MLCLGIETSCDETAVALVENGKCIGSILGTQAPLHALFGGVVPELASREHYRCLGPLYDKLMEDAKVTLADLDVIAVTRGPGLLGALLVGLAFAKGLALASGKTLIGINHLHAHLLVAAIEEPIEYPALGLLVSGGHTHIYKIDAPDIFILLARTLDDAAGEACDKFAKMLGLPYPGGVIIDKLAQQGIPDPYLFPRPYIHNSELDFSFSGLKTSAAMYLKQYPQLIEEGQRYCSNNSKVAIKEELYNVCSSYLLAISETLYIKMERALQKYTNEIKTIIVAGGLAANSFVRQAMHNLAINYNKKILLPEQKLCTDNAVMIAYYGELLAEKGYCHRLDLSAIPRGQHIPDDMVKV

SEQ ID NO: 10614 - protein, 335 aa, Lawsonia intracellularis
MSSEVTVTEHLLLQQQRAPQATGHFTSLFHDLILSAKIISRSVNKAGLLDVLGGTGDINIQGEKVQKLDEFADKVLLYRMERSGVLCAMASEEHAELIKVSAAFPRGDYILIFDPLDGSSNIDVNINVGTIFSILRRKPGKTGDVELDEVLQPGSEQIAAGYFLYGTSTMLVYTAGQGVHGFTLDPSVGEFLLSHTDIKIPDEGFIYSVNEGYWDYWDTPTREAVMYFKQPSSKEKVRSARYVGSLVADFHRTLLYGGVFMYPSDNRKGKMHGKLRYLCEASPLAFVAENAGGAATDGLYRTLDYVPLSLHNRVPLVIGSKKDVEAVANIYAKYK

SEQ ID NO: 10615 - protein, 289 aa, Lawsonia intracellularis
MSRNIFIVLCLGLTIIITGCGIQSVSNSWKRTKKFYGSYINKPACINYSDTDKLDEKDVILASRMMGIDTQLEALQRYLQNSDKPPSDESIIALLNTFPWLSGVVLIEPNGELIAQEPENLLEKSDLAKIIEAKPRGKMLRDIRAAVQETSIGPKVFFSVPVYVDSDMKALFVVYFDIEKLSLYSPYSKALVIFSPEAVLWSGQFSFEDTPLAKENWESLLKNSVSGRVSNQNGEFFWLSHFIGNQEIVFATPVSGKFFEETNQCFLVDLQENTEIEAQNTLLENSENP

SEQ ID NO: 10616 - protein, 293 aa, Lawsonia intracellularis
MTPKIEWFQEILEQEPSSRVFFPLAKLLFESGDVTKALETLRHGLEHHPDFLEARLFLIHLLYSIGDMEGCSSESILIANLFNQYPDFWAAWGQSGAQVGGDFGLYMGLISALVLYPDLTLKEFLSYGLKGLSERKSTEFSHYSNTKQSFASLQTSSQSSGIVQSSNDIVDIEEVGDSEELFFDRPEDMAVVSKSKDDSFPVCTRSMAEVLAEQGDIVSAIKIYQELESQATNHEEIVSLHARKVELSEMLAQARNASSFSSSTTNSYNINHQAEVIAMLEALVTRLEKRAKG

SEQ ID NO: 10617 - protein, 103 aa, Lawsonia intracellularis
VYSVSSRSAFLKLGVLSIAILLNIILVVRLVWGAHSLISYRELILQHKSITQELQKYDDTIARLSHEIQLLHSNPSYIEKMIRQHLNFVKDNEILYLITIKKD

SEQ ID NO: 10618 - protein, 186 aa, Lawsonia intracellularis
MIWMKIILNLANSITLVRTVFVIPIIVLLYFEGPITCFLATLLFCIASVTDYLDGHIARKENMVTSFGKFLDPLADKLLICSILIMFVKLDWVPAWVTIIIIGRELAVTGLRAIAADEGIIIAADNYGKIKTILQMVAIVPLLLHYSLFGIDFYKIGLFLLYIALILTVLSGVKYFYSFYKNWQYK

SEQ ID NO: 10619 - protein, 272 aa, Lawsonia intracellularis
MNIPLSPAMQDKQLKKNIDTIQHKLFIMSGKGGVGKSSVTVNLAVSLMQKGFRVGILDVDLHGPSIPRLLGLSGHVEVDEQGRMIPVFYNDKLCVVSMDSFLEKEDTAIVWKGPKKVGAIRQFLSGVYWGNLDFLLIDSPPGTGDEHMAVLNSIPDAKCIVVTTPQEISLADVRKALDFLRQIKAPILGIVENMSGLSCPNCGHEIEIFKKDGGVQLADKENLLLLGQISLDPLTVVAADCGKPVVCMEEHSEAKEKFLQLTEATLNALRLI

SEQ ID NO: 10620 - protein, 226 aa, Lawsonia intracellularis
MLRYHTSKNNFPLASDLRRQRERMVITQLEQRGITNSYVLTAMRNVHRHLFVPEALQSRAYDDYPLPIGYGQTISRPYIVAIMTSLLEPTPGLSVLEIGTGSGYQTAILANIGLEVFSLERVRELYFQTKELFFLLGYRKIRTCLSDGTLGWEEHAPFDRIIVTAGGPNIPLPLLNQLGDPGVMVIPVGQNPREQELMCITKKNNTVTSTVIGNVAFVDLVGDYGW

SEQ ID NO: 10621 - protein, 437 aa, Lawsonia intracellularis
MSKTKLLVITIGIASIILAAATYIFFKNTDPPIISMIQPTQYISPRQPLTLTITSKYSPLKLIQIIVKQNEYTKTLINQPIINGHLIETVDIDFKKSGLQDGPFELIVKAQDSSYSNFGKGNISNKTWDMNFDSQPPQITIHSPTPSLHKGSATAIAFTVSKPVAVIGVQLEEKFFPAFQQANGTYYCFFPFPIEFSPKTFNPKLFAQDLAGNKSYISVHVHSLERSFKIDTLTITDTFLDKKMPNFEQNFPDTQTQVERYIKVNSILRIENEKKLIEISKKTSPMMLWSGKFHTLPRAAVKATFGENRTYMYQNQKIDQQFHMGLDLASTANAPIPAANDGIVVYTGDLGIYGNIVIIDHGLGLQTLYSHLSKITAKEGDVVKKGDLIGYTGMTGLAGGDHLHFGFLVGGIQVNPIDWLDPKWIKNTIITRLNNNV

SEQ ID NO: 10622 - protein, 291 aa, Lawsonia intracellularis
MAYVSMKQMLETGVHFGHQTRRWNPKMRPYIFGARNGIHIIDLQQTVKLYRAAHDKIVETVAAGGSVLFVGTKRQAQEAIATEATRAGQYYVANRWMGGTLTNFSTIQKSIERLNRLETMFSDGSVNRYQKKEILTLNREMDKLELTLGGIKNMERLPQLIFIIDPHRENIAVKEGRKLGIPIMAVTDTNCDPDLIDYIIPGNDDAIRAIKLFVTAMADACIEGEALQKDTKNKNLEEELKQIATAECNKESTSIEQELIIASEQTETKENNIEESVSEVVITNESELITE

SEQ ID NO: 10623 - protein, 294 aa, Lawsonia intracellularis
MSISASMVKTLRERTGAGMMDCKQALEEANGDMEKAIDWLRQRGLSKASKKAGRATTEGLIGCQVLPGSTSAVLVEVMCETDFVSRDEVFKKFVDDIVSQLVANFHNNDVDLLDQPSGNKNLSIRDLLNETIATIGENIVIGRSIKMELTPGKNGMIGHYVHTNGKIAVLVELATETKETASSPKFQELAKNIAMQIAATAPLALNSESLDPLKIDREREVYRQKALEEGKPENMIEKIVEGAVKKYLKEVCLLDQPYIRDDKLSIAELIKKVSNEIGEPISIIEFVRIQLGEE

SEQ ID NO: 10624 - protein, 326 aa, Lawsonia intracellularis
MHTFSNAHVLITGGLGFIGSNLAIRLVKEGAKVTIIDSLMPMYGGTMYNIHDIADKVRINISDIRDPYSIKALVKNQDILFNLAGQTSHIDSMIDPYTDLDINCKAQLSILEACKNNNPSIRIIFAGTRQIYGIPQYLPVDEKHPVYPVDVNGINKIAGEWYHILYNNVYGIKTCSLRLTNTIGPRMRIRDDRQTFLGIWIKNVLCGKPIEVWGGEQLRDFLYVDDCIEALLLAAKNENTFGKVLNVGGKEPVSLQHVAELLIEVVGEGSYIIKEYPMDRKKIDIGNYYTDNTLISDILNWKPTTSLRTALKKTIAYYKPILNEYL

SEQ ID NO: 10625 - protein, 384 aa, Lawsonia intracellularis
MTNTYSIPQANPSIYFQQYRETIIKKIEEVLNSGCYINGEQVELFEKQFAQYCNVKHAVGVANGTDAIELTLRALNIGPGDLVFTVSHTAVATVAAIERTGALPVLVDITQNTYTMCPVSLAETLAAAYKGKYPGKPAAIIPVHLYGECADMNEILHVAGQLPVIEDCAQAHGAKYNNKNAGSIGIAGTFSFYPTKNLGTLGDGGCIVTSNTLLAEQIKALREYGWKQRYISNFPGINSRLDELHASILNIFLPVLNKSNEIRRKIAKIYHAELQKLKNIQLPLEKPDRTHIYHLYVIQVDNRDMLKIFLSNKGITTGIHYPQPVHKQPAYINRLPLSPHGLPETDKIFPKILSLPLYPGLSENDILYITSTIQKYFDSSSRNN

SEQ ID NO: 10626 - protein, 267 aa, Lawsonia intracellularis
MSSTKDIPHSKITPSITGLVLTYNGERLLEHCLTSLQFCNHILVVDSFSSDRTIEIAKSHNVQFIQNKWNGPVAQFTYAFPLIKTEWIITIDQDEICSQALQNTIITAIQNVSQNVCGFYVPRRSWYYDRFLKYSGWYPDYLLRVFRKNGIYFSQQGVHEKIHPHTHTKKLIGDILHYPYSSFYQHLEKINSYAQYGAEDLAKQKKSGGICIAISHGLGRFIRIYILKKGFLDGKAGFINAIHGAYYAFLKYIRINEGTWGAPYNHQ

SEQ ID NO: 10627 - protein, 238 aa, Lawsonia intracellularis
MSQMTYKRVLLKLSGESLAGRQLTGIDPDTVAVLCNELSSVIELGLQIALVIGGGNIFRGLSASAKGMDRSSADYMGMLATVLNALAIQDTLEKKGHPTRVLSAIAMQEVCEPYVRRRAMRHLEKGRVIICAAGTGNPYFTTDTAAALRCMELKCDALIKATRVDGVYDKDPLKFDDAEMFKHLTYEETLRRHIKIMDSTAITLAQENNIPIIVCNMFNGSIKRAILGQNPGTTVEGE

SEQ ID NO: 10628 - protein, 188 aa, Lawsonia intracellularis
MDTDKDKIFLDSQERMVKAITSLEKEFTKLRTGRASTSIVDTIKVDYYGTPTPINQLASIAIPDSSSITIQPWDKTAFNPIEKAILKSELGLTPINDGKIIRITLPPLTEDRRKDLVKLARKYGEDTKIAIRNIRRDANEQLKRLEKNKFISEDELKGFTEDIQKMTDNYIKEVETHCKTKEKEIIEI

SEQ ID NO: 10629 - protein, 240 aa, Lawsonia intracellularis
MSNPIPKHLPSHIAIIMDGNGRWAKQRGMNRTEGHKQGALTAKSIVTTCRKIGIKYLTLYTFSTENWGRPKDEIHFLFQLLVSFLKQEVHLLEENDICLTVYGDLTKLPLLAKKALQHAIARTKHCQSMTVNLAINYSGRTELLYAVKKMLTDRLNANDLNEEIFRNYLYSKQQPDPDLLIRTSGEKRLSNYLIFQTAYSELFFTNTLWPDFTEEELYAILKEYNERNRRFGLTQEQLQQ

SEQ ID NO: 10630 - protein, 265 aa, Lawsonia intracellularis
MNQEKNFPRIITGGLLLLLLFTMLILSGVYIFLLTLLFTLLAMWEFYAMFWHGDEGIGGRLISLLMGGIILTTGWLSQEALLPIIGISFIFITVYTLITSSHSTALYFKQVGILLFGIFYIPILLVPILWCTPLEQFFLICIVAISDSAAYFVGLTYGNHKIWPKISPRKSIEGSAAGLIACIIISSILGVITGKANILSFIILTSILGIVAQLGDFFESALKRATHLKDSGTILPGHGGILDRSDSLLFVIPTYALLKSFIVYF

SEQ ID NO: 10631 - protein, 402 aa, Lawsonia intracellularis
MFTYITSLPSPEWEKSFPRTISILGSTGSIGTNALDVIKSHKELFHIVALGGGKNVQLLAKQAIQWKPDYLAVQDETSKEALIPLLPINYKPSIFVGQQGYVKLASLPEVTTVLSAQVGAAGLHGTVAAAKNGKVICLANKETLVLAGKLIKNLCLQSGAVILPVDSEHNAIFQALYTRNPKTVQNIILTASGGPFRNKKYEFLKNVTPEQAINHPNWKMGTKISVDSATMINKGLEIIEAHYLYGLPSEQIKIVVHPQSYVHSLVEFTDHSLMAHLGTADMRMPIAHCLAWPNYLNVGVEPFVLSKIGTLTFEEPDLDSFPCINLARDALVAGTSAQIILNAANEVAVDAFLKKQIGFMDIPILISKALEADSTPEPTTLESIEALDQQTRHTISQWIEVH

SEQ ID NO: 10632 - protein, 374 aa, Lawsonia intracellularis
MDFLQTFVSQWNNALAVVVVLGALIFFHELGHFMMARILGIGVKTFSLGFGPKIFTIGKRKTKYSLSLIPLGGYVSLAGEEDEDENKKIEQSSQITDELFLPTEKFSNRPPWHRLLVVLAGPVANILLAFFIYWGVSWVQGSTFLLPIIGTITENSPAEHAGLLPGDIITRVDGMPVSQWDQVAEYIAESQGNEVTITLSRDDKLLEFRLTPEEKSRTNLFGEKKPAWLIGISAQGDIETRPLSFLAASVTGLKKTWFSISFTCESLLKLFQKVVPLDSIGGPILIAQLVGQQANAGIIPLLLLTALISINLGVLNLLPIPILDGGHVVFLLLEMIFQRPISPFIKTVSMRIGIVLLLSLMVFATWNDIMRLVS

SEQ ID NO: 10633 - protein, 264 aa, Lawsonia intracellularis
MRDLTLTLGISEQHLHIVFIKDEEIQYIKERSITSNGTEILGPLIIESLEKAQFSLQQISRIACIAGPGSFTGLRLALTTAIAMRRALSIPLATLNYLHVIAASAWALPELQNISLLPSLLRVITYARQKLLYIQDFLVTKTFPMPIAKPRISSIEASIQTKDPILFMGSGIQYNYSFFAEHALINPNILLFQKKISISPYALLQLVKNIPHEEWKHNDPEPLYLRHCDAVDNLSSISLKQGKNPEDACSTFKKIVTQPPLLVT

SEQ ID NO: 10634 - protein, 294 aa, Lawsonia intracellularis
MAQSNVVWSSNFTGTFQLKSIADLLNENFQFPKANLVIGGFPCQDFSVAGKREGLKTQRGSLYHCMTEVIQQVSPEAFIAENVYGLFYIPGVREKITSDFEQIGYTVFSFLLFSNEYGVPQIRRRVFFIGLKTEALKRKVSINEIIPPKTHQKFVSVGTIFKDLQEPEYTLDKEQQIYSKSKFYGSQWEGNREVDLSLPSPTLRASGPEFRRLSKEHGGKHLDELKDGKIERRLTVREYARIQTFPDDFILMFNKNNEEIISMTSAYRLIGNAVPPLLAYHVSKRLDELWFDIF

SEQ ID NO: 10635 - protein, 575 aa, Lawsonia intracellularis
MRWSQCYIPTLKEAPGDAELLSHKLLIRAGMIRKLTSGIYTWLPLGLKTLNKAISIIRSEMNRIGAEEILMPMVQPADLWKESGRWDQYGKELLRIKDRHDREYCLGPTHEEVVTHLLRGEVRSYRQLPINVYQIQTKFRDEIRPRFGLMRAREFLMKDAYSFDQDNEGADISYHTMFDAYKAIFTCMALDFRAVEADSGSIGGNFSHEFMVIADSGEDTIAFCRKCDWAANIEHAATLPPQTKALTLEKSMEEVVTPGQHTIKAVSTFLTIPEQQIIKTILYTIDNKPVAVLVRGDREVNEVKVKNMLDATVITMATPEQVHQWTGAPVGFAGPVGFTAGPIIADHELMVYNDWVVGANKPDKHILHVDLARDVQNITFADIRLITDADGCPSCGREIALTKGIEVGHVFKLGTKYSKSMNAFFLDENGEEQLMVMGCYGIGVSRVIAACIEQNNDKYGIIFPPPLAPFEIMLINLDPRDESVVMKASEIYQFFLSEGIEVFLDDREERPGIKFNDADLLGFPIQVIIGAKSLANGIIEVKNRKTGEKSSFSLERFFTDFYSWRDTVYVTWGLS

SEQ ID NO: 10636 - protein, 298 aa, Lawsonia intracellularis
MNTWNNLAMHFRRRLGCRGQKIPLDVGSSCPNRERSNSNIGCVFCNVSGSGSGLGLSGMSITEQWNYWHKHFSISNQYIRFIAYLQSFSNTYGPLSKFSSILAQIKGLQDVAGISVGTRPDCLTNKKLSLIVEMPYLEKWVEFGVQSLHDETLIKIKRGHSSKCSEQAIIQAANAGLQVCAHVMFGLPGETPTHMLQTIDRLNSLPIHGIKFHNVYVCKNTILEKEFNAGNYYPLTEADYSDLVVESLYRLRPDIVIHRVVADPLPEELVAPEWARYKSAVVRGIEKRFRARRSTHNI

SEQ ID NO: 10637 - protein, 346 aa, Lawsonia intracellularis
MAKILDFILGAFSNDLAIDLGTANTCVYVKGQGIVLREPSVVAVKKEHRGNNKVLAVGQDAKRMLGRTPGNIEAIRPMKDGVIADFEVTEAMLRHFISKVHNSRRLVRPRIMICVPTGITQVEKRAVKESAQSAGAREVYLIEEPMAAAIGAHLPIQEPTSNMVVDIGGGTTEVAVISLSGIVYSRSVRVGGDKMDEAIMAHVKRKYNLLIGESSAEEIKIKIGSAHPMDPEQQIEVRGRDLVTGIPQNIIITSEEVRKAISGQVDSIIQAVRIALEQTPPELAADIVDRGIVLTGGGALLKGLDQRLREETSLPITVVEDPLSTVVVGTGLALDSISFLREVCID

SEQ ID NO: 10638 - protein, 293 aa, Lawsonia intracellularis
MPPKRLLLISALILLIYLGGYSWNQRTHFLDTIVTNVGLETSGYVIKSVLFVQDAILDAWKKYVDLVNVREENDNLKKELSKTKRELFLASEERAELDRLRDLLKISPPIGWTIQGTRVLAGRMGSNAALATIVIDRGYLTGAIPGTPVITQDGIVGRVFRAGPTTSTVLLLIDPGSRIAVVSQKNRVQGILVGSGAMSPLEVRFVSRNRSIEPGELLVTSGLDEAFPKGIPVAKISKVTDSDMSPFQTVEATPLVPILNIEELLLLQQPVYHNQNFSSIDDVQQTESVSVLK

SEQ ID NO: 10639 - protein, 156 aa, Lawsonia intracellularis
MKFRNTLWWVLFFIISILLQKTFPGIDTLVIGLLISLEERSPLQTLWVLLTIIIIQEGCGTLDFGVSILWYSCVIGLFFIGCWLFETKNFLFIILLSIAIGITKFFVITLMSHLQNLPDNTSLIINECMLQALYIPIAWKLISLTRSWVTKYEAEA

SEQ ID NO: 10640 - protein, 597 aa, Lawsonia intracellularis
MKLKLDPEGYQPPRSGILLLQFLIGALFFVFVLRFWYLQIHKGTEFARQAQNNRLRNERVYASRGLIKDKNGILLAENRPAFGLALVREDCPDITTTLAQVSVWMDTPLEQLIAKFNQDKRKVKPFEPILLFTDIPFEQVAKIESQLMHWPGLITVAHSKRYYPQSHEFAHILGYVAEANEKELAMDKVLSLGDTIGKQGLEYILEPRLRGEKGEYSVEVDVLGRALGKVLVKAPQHGEDIQLSLDAQLQQKIVSLLDTHAACVIVIEPHTGRLQALVTTPAYDNNLFVRGLSQKNWEILRDNPRHPLQNRTIQSTYPPASIWKLLMIGLFLEEGIAPSTHITCTGSVTLGDHIFRCWKKHGHGSVDMKRSLTDSCDVYFYILGEKLGIDKIENFAKACGFGSLTKIDLPYEKVGLVPSRSWKRSRFGDNWYKGETLNTSIGQGYTLTTPLQIAVFVSSLINGGNLMKPLLLSEDKPQVLGKIPFSEETLAFINNTMRLTVEKGTARVLRRNDAIIGGKTGTAQVVKLKMVGERRLKADEVSYMERDHAWIASWGKKDDQEVVVVVMIEHGGMGSSTAGPIARKVYDILFSTKQEHS

SEQ ID NO: 10641 - protein, 371 aa, Lawsonia intracellularis
MEPIDRRLITHINWGLLAYTGILFFIGTSNLYSASGIRLENGITLSPFYQRQIVWGGFGLLAMIVSMSFDYRKLQSLALPFFLFTLFLLILTPILGKTIYGAKRWIPLGLFNLQPSELAKLAVLIMGARMLSLDGAPLSWAQLIKMLIIGVIPAGLIALQPDLGTALTVFAILGGMVCYHGLQPHVLRICLIIIPLLIPLSWFFLHDYQKQRIVTFLDPTKDPRGSGYHIIQSQIAIGSGQFSGKGFLQGTQSQLRFLPEKHTDFAIAVFGEEWGFLGCITLMGLFCLFLLGIFNTVKGAKDRFGSTLAAGIFMYFFWQFFVNIGMVLGLMPVVGIPLPFLSYGGSATLVNFILIGLVLNISMRRFVFKSY

SEQ ID NO: 10642 - protein, 115 aa, Lawsonia intracellularis
VSKEEINAFLGSGTTYQGNLIFQNAVRIDGSFKGEIQSEGSLIVGKEGSIEGTLDVGELILSGFFMGEVRATRKVTVHKTGRLQGTLVSPALIVEEGAIIDGQVVMQSPMPELSE

SEQ ID NO: 10643 - protein, 140 aa, Lawsonia intracellularis
VIELNITLLIQLINFLIALIGINYILVQPIRNSIYQRQQVFSSKEVYISELTHQVNKDLLQYEFIITKTKEEAISYYKHEQENTERLKNTMLNEAQEEAKKQTKETQITIMTEAQDAKQLLEKEIVPFAHNIVTNLLKNV

SEQ ID NO: 10644 - protein, 192 aa, Lawsonia intracellularis
SLNTFFSFILSKDGIITIAGIILFSILIHFKDPYHPWINLLGRFGNLSIFLYILWRAAGKKIIQFFSQQKNNIIHKLQTLELQKNEVEKNLAAIQAQMALLNAKQEAIREESRIQAEKLKKYMFDETQKEIEHIHKQTQQIIETESKEIAYNLRSQLADQIVSKAEKELKHQLDMASHFKLIDNALTKVVLS

SEQ ID NO: 10645 - protein, 188 aa, Lawsonia intracellularis
LIGDIIAQRYAQALFDLGKEQSLHEVELYDTALSQIEELLMTSNELTYFLHAPIFTIYEKQGVLLKLLELIDAAQPIKNFCLLLAEKERLPLLTQIINSFKVLLDNAKNIVHGQLITAITLDEKKQSELLISLEKQTNRKLELLFQVNPDILGGIVLHIGDKVFDASLRTQLECIRNTIKKGETNHAY

SEQ ID NO: 10646 - protein, 506 aa, Lawsonia intracellularis
MHIKADEISTIIKEQIQNYSQRIETTEVGTVLSVGDGIARVYGVQDVMSMELLEFPGNLLGMVLNLEQDNVGVALLGDDTGVEEGSTVKRTGRIFSVPVGDAVTGRVLNPLGQPLDGLGPLNATEKKPVEVKAPSIIDRKSIYEPLVTGIKAIDAMTPIGRGQRELIIGDRQTGKTSICIDAILAQKESGVHCFYVAIGQKASTVALVADTLRKHGAMEYTTIIAATASDPAPLQYISPYSGCTMAEYYRDHGQHALIVYDDLSKQAVAYRQMSLLLRRPPGREAFPGDVFYLHSRLLERAAKLSDELGGGSLTALPIIETQAGDVSAYIPTNVISITDGQVYLEPNLFNAGVRPAINVGLSVSRVGGAAQTKAMKQVSGTMRLDLAQYRELAAFAQFSSDLDKETQTKLERGARLVELLKQPQYQPMQLPEQVIVMFAATKGFMDDIPIDHIQNFSKTLIEYIQTMNPKILENISTQQALNEELDQQLTTAITECKKTFLPMNKR

SEQ ID NO: 10647 - protein, 289 aa, Lawsonia intracellularis
MASLKDVKIKIAGVRKTKQITKAMNMVASAKLRGAQIKIEHFRPYAEKFQDVISNLATRSDETVHKLLEKRTNGTSCIFILITSDRGLCGIFNTMLIIKALELAKQKTTKGKKVSFICIGRKGRDAIKKTHYPILSDYSDKFTRDYQLASHISEKVIDGYLTVNMDEVVLIYGQFINAMRQIVGFSTLLPIHPKPLDKEQLEKYSEYIYEPGVAILLSELLPKFVTTQIYRGFLDTDASENAARMTAMDNATRNCDELIGNLTRLYNKTRQASITSELIDIVSGAEALK

SEQ ID NO: 10648 - protein, 471 aa, Lawsonia intracellularis
MSENIGKIVQVIGAVVDVSFPNGKLPPILTALEIHNPNSIDAPKLICEVAQHLGDDIVRTIAMDATEGLKRGMDVLDTGHPIMAPVGKASLGRIMNVVGQPIDGLGVIDTKTYLPIHRKPPSFLDQNTSVEPLETGIKVIDLLVPFPKGGKMGLFGGAGVGKTVILMEMINNIARQHGGISVFAGVGERTREGNDLYHEMKEAGVLEKAILVYGQMNEPPGARSRVALTALTCAEYFRDEEHQDVLLFIDNIFRFIQAGSEVSALLGRMPSAVGYQPTLGTDLGSLEERITSTHNGSITSVQAVYVPADDLTDPAPATTFSHLDGTLVLSRQIAELGIYPAVDPLDSTSRILEPNFVGEEHYTVARGVQKILQKYKELQDIIAILGMDELSDEDKLVVSRARRIQRFLSQPFHVAETFTGTAGEYVKLEDTIKGFKGILAGEYDHLSESDFYMVGNIDSAVAKYEKRKESK

SEQ ID NO: 10649 - protein, 133 aa, Lawsonia intracellularis
MEQSLHLEIISPDHTIVSDRVTYVNLPGVNGELGILPGHIPLMAALDIGKLHYQQDSKNYYVFISAGFAEVSNNKVTVLTEAAEKASEIDVARAQAAKERAKARLLKAEEDIDMARAEAAMHRAIIRLNISSL

SEQ ID NO: 10650 - protein, 480 aa, Lawsonia intracellularis
MAEILSVQELTYKIKYAVETLLPYVWVKGEVTNYSCPTSGHIYFSLKDNESYLHCVWFNSMQRETETFDPLTGEVFQNGPRLSLAKTITNGQKIICAGTIGVYPPKGGYQLLVDFAQSEGVGEWYSALEKRKNELQQQGYFDLSRKQIIPHNPKKIVVITSPAGAAIQDFLRIAKERGTEKYIRIYPVTVQGEESIHQIAQAIHTENNSNWAEVIVLIRGGGASQDLMVFNDQQLIDAIYTSKIPILAGIGHESDISFAELTADLRAATPSHAAQLLWSERTQLKQQVHDMEIALTKAAHFQLQKIQYVFNKLNTTLQWLSPLKKLERNELQLNSIYEKLNAIFNYKLKLKNLDLIQYTQLPSYSIVKKISYYKEQLSFLQRKLYRYIHSILLTKKQNTNNNKQLLINNFFQKYQQLLYNYEKLHVTLKMLNPHLLLKRGYALIYLPNGQILHSIQEAPEQTILTIKLPDGLLSVKVISA

SEQ ID NO: 10651 - protein, 289 aa, Lawsonia intracellularis
MRYLQQHVYYILFFLLPFCIVTKVSANSSLQIQIPNKVQQGTAILVSVISPIPESNAIFLWLNKSITVPFKKKGRHWEAQTLLPITVDMAKSEILAVRTSNNYIQQSIHIEPVHWPKQYISLGKKKQKFVTPSKKLVARLEHERKMIKEALSNISCKQYWSKPFVRPVKGIITSPFGGQRIFNGKPCSYHQGVDLRGAIGTPIKAMAAGKVTLSADLYYFGKAVFIDHGQGIYTLYGHMSRRDVQVGDMIKAGQKIGLVGATGRTTGPHLHFGLKILGHPVDPISLFPE

SEQ ID NO: 10652 - protein, 300 aa, Lawsonia intracellularis
MNFLHHNYQSILKQRVTLIEDFLKTCIQENNISSTLQHAMNYSLLAGGKRLRAVLCISSAALFDLSPTSILPFAAGIEMIHTYSLIHDDLPAMDDDDFRRGKPSCHKAFNEALAILAGDALLTDAFTFMSTLNSIVPSNNILVAIHEIAQAAGSNGMVKGQSMDIEHTGVSDVSFNTLCIIHEYKTGALFRASCTTGAMLAGANESAIYALKCYGEALGAAFQITDDILNVTADSITLGKPTRSDQEKGKITYPSLLGLEKSKKLAEEKIHLAISSLDTFTGDEVLFLKEVANSLLTRTH

SEQ ID NO: 10653 - protein, 637 aa, Lawsonia intracellularis
MTHPPDTIVKSILSHISNPCDIQKLSLQDKLTLAEELRSIIIKTVSNNGGHLAPSLGVIELTLALLATFNPAEDKLLWDVGHQTYAWKLLTGRAHNFSTLRKLNGLSGFPKITESQYDHFGAGHAATSISAALGMAMARDLQGLKHHVIAIIGDGSLTAGMAFEGLNQAGAMGRRLIVVLNDNEMSISKNVGALSLFLSRNMERGWVRRVRHEIKDWLKSIPSIGDEVAEYASRTHRSLKTVFTPGILFEAFRFNYIGPVNGHDIESIEKHLAMAASIDDQPVLLHVLTKKGKGYEPAEKNPASYHGLGAFDIQTGIPKSNSQNSPPTYTEVFGKTLCELAEKDKRIVTITAAMASGTGTSLFKAKFPTHFTDVGICEQHAVTFAAGLASQGYKPFVAIYSTFAQRAYDQIIHDVCIQKLPVTFCLDRAGIVGEDGATHHGAFDISFLRCIPNISILAPRDEAELQSAIYTALSFNSPLAIRYPKGNGVGVTLPNESTPLPFEGELLKEGHDAIIIAIGSMVMPAYSAAQQLQEEKNLSIAVFDSRWISPLPQHQLIELANTFNNILLIEENALAGGFSSAVVELFADNQCLHGQRIQRIGIPNYFIDHGSQKELKQCLLLTVDGIKKMLLQMLQPE

SEQ ID NO: 10654 - protein, 341 aa, Lawsonia intracellularis
MIHRKLPTSLQDLPSEHARLCLSIKRFLEENLSQNIQGTVIVGCSGGVDSMALALILHCLGIDVVFAHMDHQLRAESKDDANHVKSFAAALDRRCIISRVDISGLAIKYKKGIEETARQERYCFLEQVRKEYGAQWIATGHHLNDLSEDILLRLLRGTGWPGLAGMKAVDKKRYLLRPLLTTRRTLLVSFLSSQNISWVEDNSNKDITFKRNRIRHTILPLFEEENPKFSNVAHMLWSLAKEDEEFWDKMITDVFSKIEGSPEYFWIPRSELITLPKSLRLRVYIEAIRRLNIGQGRASTLFLLDNTLMKGERKKFFQFPGNVLVKLEQDKVIFTATIKNT

SEQ ID NO: 10655 - protein, 259 aa, Lawsonia intracellularis
MIKAAFDNYKSIFIPFIMGGHPNLEVSTKAIMALARAGADIIELGVPFSDPIADGPVNQRAAEVAMGNGMNFGEVLKQVQVIRGMGCKTPIILFTYLNPILAFGYDKFLHQAKAAGVNGVLIIDLPPEEGEDFYAMLQEVGLEIVLLVSPTTDLARLPIYITLQPSFIYYISRLSVTGIQQDLSNTLEEELYSLCKALPNTKIAVGFGISSIDQARYVSQIADGVIIGSKLVSILETSGVGVFEDKAREFADIIHGGKL

SEQ ID NO: 10656 - protein, 389 aa, Lawsonia intracellularis
MSNKKGYFGEYGGAYAPETLIAPLAELEAAYLKLQHEVAFKQELQDLLTHFVGRPTPLYFAKRLTQHLGGATIYLKREDLTHTGAHKINNTVGQGLLAKHMGKRRLIAETGAGQHGVATATIASLLGMECVVYMGAIDMERQHLNVVRMQILGAEVQAVHNGSQTLKDATSEAMRDWVSNIKDSYYVLGSALGPHPYPTIVRDFQRIIGIEARKQLLEMIDELPDELVACVGGGSNSIGLFHPFLQDLQVKMTGVEAGGISLCLGEHAARFNGGKPGVLQGTKSYLLQDDHGNVSNTHSISAGLDYPSVGPEHAYLHDIERVQYTYATDQEALNAAFTLAKLEGIIPALESAHAIAYAIKVAPFLPQSYIMLIVLSGRGDKDVETLATY

SEQ ID NO: 10657 - protein, 205 aa, Lawsonia intracellularis
LRCVIKAKICGITNLEDALFAANNGAWAIGFNFYKNSPRYVSLEKAREITSQLPIHVIKVGILIDYSQDEMLDALEFLDLIQIYQLHFKLPLDKKRIILALQASSKDELPESSILQEYGFILLDAPKRQDGLLGGTGRLANWDLARELTDYKLILAGGLNNLNVDAAIKHVQPFAVDVASGVEERPGIKNPLAIKEFLMRCKNVK

SEQ ID NO: 10658 - protein, 240 aa, Lawsonia intracellularis
MPDSLVEMPNTLDFCKIFTTSSKPIIISEVKFSSPSCGQIYQGKLNHVDIAGDYLNSGAAALSVLAEPDYFQGSISFIKDIRGAHLNSYILLKDFVLSKKQIAQGLLYGANAVLLIVAFLNKDLLKELYDYSLDLGLTPIIEVHDGFELEQALQLSPQIIGINNRNLQTLEISLDTAWNLIKYIPNDCYAICESGIDNATQIREMMDIGFDGFLIGSSLMKYENPGVELQKLISEVCNKS

SEQ ID NO: 10659 - protein, 328 aa, Lawsonia intracellularis
MMKKLLHLKNLTQEEAYELFTEFAEYEPEKQSAVLTLLQAKKETAEETLGALQYFSKHSAKITHDLEVVDIVGTGGDSKGTFNISTAASFVIASCGIMVAKHGGRSATSKVGSQDVIQALGIRIAQTVEESLKSLQQINYTYLWAPLFNKELKKYGALRQKLGFPTIFNILGPLLNPMRPKRCVIGVYRRDLVQKVAEVLATQGVNHALVVHSDDGLDEFSISSNTHIIELNGTDIKEYSLNPEDFGFSKAQLSDVRGGDAAKNATLICDILSGTINGPKLDIVLLNAAAGLYVAGKSSSIAEGILLTKDAIEQGKVTTLLNKMRGSI

SEQ ID NO: 10660 - protein, 378 aa, Lawsonia intracellularis
MLVDKFILPECKVYMCGHSLGPSLKTTSDAVCSTLQDFASYGVSSWNKSGWIDLSYALGAKIAALVGAKFDEVIVCDSTVLNLFKALKVAMSLQNGRNIILTTDDNFPADLYIAQGISEVKYIKSNEIYKNIDETVAVLMLTHVNYRDSSVLDMKTINEYAHKYGVLTVWDLSHSIGIVPVDLEESSTDFAVGCTYKYLSGGPGSPAFIYANRMYHEHMQSPIQGWIGHNQPFSFEKEYTSFGVRKFMSGTPAILSMKALEAALEIFDKEVIVKSYSIAKEYSNILIKSLKSHGIEVYAPQNRGGHVAFMHKHGYAFSRALIDAGFICDYRAPDLIRLCVNPLYISLRNIESCIEQIQFIMERSLYLKPEYNQMQKVT

SEQ ID NO: 10661 - protein, 272 aa, Lawsonia intracellularis
MSIELLYTGVLQGLILAIIAFGIMIPFRFLNFPDLTAEGAYPLGGAVCASLMVANMPQILAMMAGIMAGGLLAVGTSQVALRLKVNSLLAGIILSTMAYSINLRIMGKPNIALFDMDGIHFDFISLIIVGMFCIVPFALFLHTDFGLRFRTVGSNPKFAINHKISINKYTSLGLFIAGSMFGLAGSLMVQMQQFMDIGMGVGIVIHGLASLMIGESIVGNSTIPKQLAAPIIGSLIYQQIQGVALSLGLAPSDLKFFTGSIVLIVLAIQKGK

SEQ ID NO: 10662 - protein, 244 aa, Lawsonia intracellularis
MINIIKVTKSFPGLFRPVINDISLYLERGDFCVFIGANGCGKSTLLKLISSEYQADSGAIKLSGDVAQVVQDVNLGTVPEMTLLENIALSEIIKPKLLFYKRYKDQILQKLKELDGGLEDYINQPLKMLSGGQRQMIATLMAIISGRQILLLDEHTSALDPKMQTLLMEYTHQQAINHGLTTIMITHKMDDAIKYGNRLIMLHQGKIVLDIHGAQKKAMTVQGLLTMFHQYEDQLLVSGGGNVN

SEQ ID NO: 10663 - protein, 323 aa, Lawsonia intracellularis
MKKNFFYFIAVVITLVIAFITYNNKVNNKLPVVAIANYGPHTSLDAVIAGFKEQMQVEGFTENQTIRYEIADVGFDHALIPQTIASLRAHHPKAMVVISTPIAQFAKGKIKNLPLIYSSVTDPVGVGLLQEYNKSDDNMTGSSDMQDLNSLLQFAKFLLPNAKSIGLLYATSDSNDTSLVKMMQSAASEYDMSVVAIPVEQAREVPIRMQGFKGKVDLIYVGVSGPIQPTLPAIAVEAHKMRIPVFNADIQAVRDGLVIAGLGVDYYAVGRNTGKLVSAILHGEKISELVPIYPSAQDHHGVINKKLAIELGIAIPSNIEIVE

SEQ ID NO: 10664 - protein, 278 aa, Lawsonia intracellularis
MNMIKHCLILIIFLVTTLHTHLYAHQANRTILITASTGAIGEAISTLLASEGYNLVIAGRNSNKLITLQKKLQTKHKDISVQTVIIDFSNIESIETAVNQVQQLHGIVLIGPRPSLKKEDIPSKEEWNKAFNETFINPLEVLRHFNPKIADKSSIVIISGNTSKNYFPQFPNTNVIRVAWVAEVKNLIYFFAKRHIRVNLVSPGIILTEHHKKVIQQKAITHNISFKEQLTREVSSIPLKTYGTTEDVAQLVSFLLSNKSKHLNGANITLDGGEATSY

SEQ ID NO: 10665 - protein, 322 aa, Lawsonia intracellularis
MGLFFIMRNDWTFKEAKQIFNLPLLELLYKAQTIHRKYFDPNKIQISMLLNIKTGNCPENCGYCSQSSHYKTDLQKEPLVDIDTLISEAKKAKELGSTRFCMGAAWRSPLDKDLKIVCQMIEEVKKLGLETCVTLGFLKEHQIAMLKKAGLDFYNHNMNTSPEFYEHIATTHTFDDRLATLKAVRKFGIKLCSGGIIGLGETIDDRISMLLLLATLEEQPESVPINRFVKVAGTPLNPQSDIDPFDFVRIIALTRILMPKSYIRLAAGREQMSDELQTLCFMGGANSIFYGGRLLTTDGPQPEQDDLLFQKIGLEKVQTICH

SEQ ID NO: 10666 - protein, 381 aa, Lawsonia intracellularis
MYYRYKQYISHLHDTKKYRSLPVIHKNYKKDILDFSTNDYLQLAYHPNLINAAIMTGSTYGVGSTGSRLLSGNNELFERLETTIAQDKHTETAMLFISGFQTNVSVLSALLDHHVLKMQPLVFFDKLNHASLYQAVFLSKAELLRYYHNNMEHLSSLLKKYKDDNRPKFIVTETLFGMDGDIAPLTDIVSLSSQYQTFLYLDEAHATGLTGIHGYGLSTTVNLSHIPHIVMGTFSKALGCSGGYIACKQLIKDYLINKATGFIYSTAGSPMVLGAAQEAWNLIRTLDNQRAHLNSLSKELRDGCNQLGFNIGTSSSHIIPLILGSEEDASHVHKKLLEHHILTSYIRPPTVPPKTSRIRIALNVGHNKADIERLLQLLSTL

SEQ ID NO: 10667 - protein, 212 aa, Lawsonia intracellularis
MKKYFIFCHGFGYNKNFWKPLLPFFTNEKCLVLDLGYYGNHSLLTSDIRNKKLIGIGHSLGLLKLLQLSINFEYLIGLNSFINFLGNDTQLALTRKTELQRLTKHFLVSPLKTLYNFHKRCGVPIKKNILTTFNFYTLYEDLTLLSSLSTIPYNQKGLIIGSQNDPIVPPQLIYDNFKIYPNMTIKIIPSGGHGLGFLYPQRIYQYIKDVLM

SEQ ID NO: 10668 - protein, 212 aa, Lawsonia intracellularis; identical to SEQ ID NO: 10667

SEQ ID NO: 10669 - protein, 247 aa, Lawsonia intracellularis
MIKQKIQSSFDVASDTYDTVAHIQKESAYILVKNLHNTISTFYPKTILDLGTGTGYIPEILLSYYPYASFMLNDIAPKMINKVQQKFNKTSNISFYIGDMESIQIKPYDLIISNFAFQWIEKLETMLKKLYNNSKVLAFSCLLDGTFKEWKQILQSYNIPSPLKQYPQQPVLYKCISALGSTTHYLETKCFQLPFTGARSFVNYLKHLGAAVSNKPLPTQKVKNLITNYNESFHVTYNVFFGIMERK

SEQ ID NO: 10670 - protein, 203 aa, Lawsonia intracellularis
VQFFIIGTDTNVGKTIVSSWLCLHTAYDYFKMIQTGSINGTDSDILKKLTYSKIHKEAYCYKEPLSPHLAAKLEQDEININNIILPNASNLVIEGAGGLLVPINQQYLLLDIISYLMLPVILVTHSRLGTINHTLLTLQALKSKGIEVVGVIVNGKPNQDNCDAITWYGKTTILAQFPFLSTITKTTLRNIPLTQELKQLFIV

SEQ ID NO: 10671 - protein, 425 aa, Lawsonia intracellularis
MLSLTERDKKIIWHPFTQEKTADPVISISHAKGSYVFDENGTAYLDCISSWWVNLHGHSHPDIAQAIYEQALKLEHIIFAKFTHSPAVELCEQLTSILPLTLTKCFFSDNGSTSVEIALKMAYQYWYNKKHPEKTLFLSFEGAYHGDTFGTMSIGSSGFHNIFSSFFFNVLRIPYPDTWDGDNEIEKKEAHALHVLDKYLLEYKNTIAAIVIEPLIQAARGMRICRPAFLNSIIKKVRNAGILVIFDEVMTGFGRTGTYFAFEKLDVIPDFLCLSKGLTGGFLPLALTITTDEIYNAFLHEEWKYALAHGHSFTANPLGCAAALASLKLLLHEKTTLAMQSIHQAHIDGISFLQKSCSNVTKTRVLGTISAFELHDTTHIKQIESSFLANGLLLRPLHNVIYIIPPYSTNYKELMDAYNKICKIL

SEQ ID NO: 10672 - protein, 191 aa, Lawsonia intracellularis
MLKLFHTLLILFILIVHANAHDLYIVYKDNICQATLDEKTYKCSIGKNGTSNCKVEGDKSTPLGKFPLRKVFFREDKIGNNIKTGLPSRKIKKNDGWCDDPTSIQYNKFVDLTCFNNSISHEKLYRDDDVYDLIIVVGYNDSPPIPSKGSAIFIHVAREGFLGTDGCIAFAQDDLVEILSKLDKTSKVIIQ

SEQ ID NO: 10673 - protein, 455 aa, Lawsonia intracellularis
MVEKQKRDSFTSKIGILAATLGSAVGLGNIWKFPTVIGQNGGASFLLIYIIATIVAGLPIMIAEIAIGRSTRANAVEGFKKLSSGYWWLVGFAGTLSTVFVLGFYTEVAGWIYAYIFKAANGSINTTQPVVAGYIFQELLSNPWQTLLWQWLVIILVATIVLRGASKGIEKAATILMPILFILLIIICIRSITLPNAIEGLRFLFMPDFSKIDGRVILLAMGLAFFKLSIGMGVMLTYGSYFKDDVNIPYMATKVMLLDLVVSLLSGIAIFPVVFSFGFEPSSGPGLLFITIPAVFDSMPAGQIFTGAFFILAAVASTGAMLSLFETPVAWAIDTFNLSRKNTTIIIMLFFIAFGAPVALSENILKHITIFGMNFFQLYDFLSSNILMPLGGFFLCIFVGYVWNKQMVMHAISNGGTLHNQGLIKLLLFQCRYVTPVIILIIMLHGFNLFAYIFN

SEQ ID NO: 10674 - protein, 356 aa, Lawsonia intracellularis
MYTNIKTYSFQLGVLGEKKYNRIIPIFLPFEGCPHRCIFCAQDKQTGLGYGGSKISLSDNLANLFTRLKKEKNTFSSEKLLPEIAFYGGTFTLLPTASMQLCLNMVKQCLAEGLISGARCSTRPDAVSPAILTKLKAAGINLIELGVQSFSNIALSLVRRGYTQHIIKEGCYNILSAGLRLGIQLLPGMPGSTAEVFLNDVEQSLEQNPACLRFYPCLVVDGTQLADIWRKGLYQPWDINTTVKILGKGLVRAWSKKIPVIRLSLAPEDTLEASILAGPRHPALGSMIQGEALFHLIYEKVKQIGQSPSSVCLPSFCKGFFYGHAGMLKKHWASIGINSVNIQWSNTINYGKLIFL

SEQ ID NO: 10675 - protein, 146 aa, Lawsonia intracellularis
MSMSNQTDCIFCNIIQKKIPCVSIYNSDNFIALLDINPVNKGHTLIVPTQHVETMFDIDPSLGTDLLSIMQHIGPAIMKATNAEGVNVIQNNYVAAGQEVPHLHWHIIPRFIGDSRIRWEKGKYKNHQEMIDIATNINSIIYNDYS

SEQ ID NO: 10676 - protein, 96 aa, Lawsonia intracellularis
MNNVLTKVDIIDAIYEKINNNKADIKNIVETLLSIMKQAIKTDNTLLISGFGKFEAYSKHTRKGRNPQTDEAITLPSRKVIVFRLSKKFRTELNKL

SEQ ID NO: 10677 - protein, 216 aa, Lawsonia intracellularis
LPISSLVPLTEIRQYCLQLGFSLSDQEIESLRGYLCLLTKWNKVMNLVGFTTWKTICSNLIIDSFHLAIFIRSLSLPTDPLCWDFGSGAGLPGIPLRIIWKEGSYWLVESREKRAIFLKTLLAQYPLTQTYVYCGRVEEFMLANCLSDVALIVSRAFMPWQALLKLIEKKISFKGVIVLLLNDIPKNIDSCWYIQTTYPYSIGGEKRFFVALKKAS

SEQ ID NO: 10678 - protein, 612 aa, Lawsonia intracellularis
MRQYRIIYLLLFYFIFCLSISHPVAADITYSPLDVKFAYALDTGTSPETVIIKMVLTVDDNYYTYTHNEKEGLPTKVVLQNSSGTILQSRIFYPEGEIHEDVSSGISIKKVYSGEFPIFLQVQRDALTPESEVQLSLLLCSSKHCMPVNRTIPITLPNPLPSIDEVPWEDTYLLYTNPVVHTAESEHLIDSTEQTTDIAESLFPWDLHPRYFQSGLEPTRIELALLFGFLAGLILNIMPCVLPVLTLKFSFILSHLGYKGEHCFRYVREQNLLFAAGILSWFVMLALGVEVLELAWGGFFQSVPVVYGLMLIVFILALSLFGFFTLPIIDFKIETTSFPRIQAYFTGVMTTLLATPCSGPLLGGVLGWAVLQPFYIIFIVFLATGLGMSLPYIIFAFKPQAIRFLPRPGAWCGTLEQLVGFFLLGTTIYLLSILPETMLIQAIVTLLIAAFAVWCWGVLGGLSVSSTQRVVVGVVVSCMIAMSVWWSFHPAEKAHWLSYSDTKFRKELGLTPMLVEFTADWCPTCKLLEKTVLTTSFLEQLVNEYGIKLIKVDLTNKHSEAEALLRALGSVSIPVTAIFPSGEKANQPLVLRDVYTSEQLEKALQLAIKSSE

SEQ ID NO: 10679 - protein, 396 aa, Lawsonia intracellularis
MLYFYIMAITTPKSLFYSTPECLRTIQVINVRWFNATAWYALELSRLLIKAGHKTLVLTLNNTETHYKAVEMGLSPIPLPLNTKCPFIFFKLIQSIYQQIKVFKPNIVNCHRGEAVFLWGILRKKGNYALVRTRGDQRLPKRNIFNKLLYRSMTDAIITTNTKMSSHITSLLNVKESLIDTIIGGVDNQRFYFSELGRRIVRSKYGFTANHFVIGLLGRFDRVKGQKELINAIALLIQEGYTSIRLLLIGFPTTISKEEVEVWIKEAKIEPYVIITGYVQSITDYLSAMDLGVIASLSSETIARAALEIIACKRPLISTNVGVMPDLLPLEALVEPGNILALKKVIQKAIVNSSWRKWLVDISSNRMKSQTSELFLSETLESYSKALSNRFHAVYG

SEQ ID NO: 10680 - protein, 410 aa, Lawsonia intracellularis
MAHTNKHYLDLPGSYFFTEINQRVNTYKKTHPEKSIIRLSIGDVTRPLVPAVIKALHDATDEMGQPSSFHGYGPEHGYEFLIGEIIANDYTSRNVHIEADEIFVSDGTKCDIANIQELFDPSDTVAIIDPVYPVYIDSNVMSGRLGKLINGIWSKLIYLPCTIENNFIPELPTQHPDIIYLCYPNNPTGTVLSKDQLTIWVNYAKKEGAIILFDAAYEAYITDPTIPHSIYEIDGAKEVAIEFRSFSKTAGFTGLRCAYTVIPKELKANTREGNEQYLNMMWNRRQTTKYNGCSYIVQKAAAAIYTPEGQKQIQESIQYYMKNALIIQNAITQMGITAVGGINAPYVWIKTPDNLSSWDFFDLLLQNAGVVGTPGVGFGPHGEGYFRLTGFGSYEDTNKAIERIQKALLI

SEQ ID NO: 10681 - protein, 282 aa, Lawsonia intracellularis
MSKVFQEFYQQYKEVQEIQKELEKPLGLIVDILGPCPKETCKKYGLPEGCTILDIPSSVFFNKKKKKLKFIGGLHFASVATECFLFMQGEWPRGNQTNLNISYEQLEQLYPIYNTLSNIVNRLPEMATSRGSLLLNAIADALTSSDVDSNINKAKLVIFSGHEGNIQSIAGLLNLQWKIHGYPPNGTPPGGMLMFTLWETPNGNIVKIHYVCQELEAIVSPVGYPQKFFKQQLKVIPYTSSSYTNTEQLECSEKQFRDWIDNVVDKNLLPKQKVLLKSKRVL

SEQ ID NO: 10682 - protein, 183 aa, Lawsonia intracellularis
MYNFSLFLLLVGLILGTFQPIAAKEQDQERLIKMVVLSRHGLRSPIVPNSELDEWTQKEWPYWPVNNGYLTSRGSILISNLWEALREDPWLNELLPQDICPNPELIYVRANTAERTQATAVAILNGLAPGCGLKYFFLTLRIRILFLIQQKQEIILLICLKSFKNFINNIRKFKRYRKNLKNL

SEQ ID NO: 10683 - protein, 441 aa, Lawsonia intracellularis
MYNRVNFIIWLIATFFIVFFSIAEEVKAEERLIKMVILSRHGFRPPVETHEFLEEWSEKQWPYWPVKDGYLTQRGSVLISILWEGLHEDPWMKELFPRNICPDPQSIYVRSDTMERTQATAIAILNGFASGCDFQYRVLDTTEGDPLFTPLETGCCSLDFTKVIQEFNQQYGGVQTLRKDLEEPLKIVADVLGYCPEATCKKYGLSSECSVLDIPDTIILNKHNGVHLTGGLGISALSAALFFLELGEWPKGNLSGINVSQDIVKKVFPLQTKIFNAIHRIPEMATVKASGILKTITDALTNSDTDSDVNKAKLVIFVGHDTNIANIAGILSVDWDIPGYPSGATPPGGMLVFTLWETPNGNIVKAHYICQSLETVTTPSIYPQKIYKQQLYSVSPTTSKKVNKEPFEYSEKQFKEWVYRLVKKDCIIKETRPLISKRTLY

SEQ ID NO: 10684 - protein, 418 aa, Lawsonia intracellularis
MNYPPETQYEALEKRGVSRRDFLKFCSFAAVYLGLGPTGHLDIANAMENKPRLPVVWINGLSCSCCTESFIRSAHPLASDIVLSMISLDYQDTIMAAAGHQAAEVFEETITEYKGRYILAVEGNAPLADQGMACFQEGRPFLETLKRGAEGASAVICWGTCASWGCVQAAHPNPTRATPVPKLIHDKPIIRIPGCPPIPEVMSNVVAYILTYERLPELDSQKRPAMFYGKTVHDQCVRRAHFDAGQFVESWDDPAASLGYCLYKMGCKGPTTYNACPVTRWNDGVSYPIESGHGCIGCSENDFWDRGSFYDRITTIPQFGTNTTANTVGLAAVGAVGAAAATHAAISTAVHLKRKANAKVEEENAQPHTCCHSHQSTDNTTAHTCCSNSADEKTQNTTACCHSKNVMNSGNSNETTDS

SEQ ID NO: 10685 - protein, 602 aa, Lawsonia intracellularis
MSYQYSTQGYEVTDAGKRIVVDPITRIEGHLRCEVNINSSGIITNAVSSGTLFRGLEIILKNRDPRDAWAFAERICGVCTGTHALTSIYAVENALQIEVPANANFIRNMMQLALWCHDHIVHFYQLAGLDWIDVVSAAKGDPKKASELAQSISSWPMSSPGYFADIKKRLVDIIGSGQLGIFKNGYWGHPAYKLPPEANLMLVAHYIEALNMQKEVVKIHTIFGGKNPHPNWIVGGMPLALNLDAKGGADVINMERLEYVQRIINICKDFTSKVLMPDTIALGKFYPEWLSIGKGISHLSILSYGGFPTISNDFSNDSLLVPNGAIINGNFNEVHPVDLFAEDEVREEVSHSWYRYPNDITSLHPFEGETIPEFSVGPNTKGTETDIKELDERARYSWIKTPRWKGHMMEVGPLPRVLIAYYMKREETVTAVDEICRQLNVPVTHMCSTLGRIIARSHEAVWAAEKLQYFFDRLIANTKAGDLTVANTTKWEPSTWPKEAKGAGFTEAPRGALGHWVVIKDTKIDRYQCVVPTTWNAAPRSDSEQLGPYEAALMDTHLAEPEKPLELLRTIHSFDPCLACATHIIGPDGNEVLSVQCNTAGC

SEQ ID NO: 10686 - protein, 234 aa, Lawsonia intracellularis
MEETPPPQKAKYIIELPVRIWHWSIVICIATLILTGYYIGYPWHSIDGHPTYLFLMGYMRIVHFSAGFILAIGIFLRLIYAFFGNNYSKQIFVIPIWQKSWWHGLIGDFRWYLFIDKTPHVHYDHNPLAQVGMFGCIFLIFFMTFTGMGMFIMSSDNPWLVHTFHWVLDVAYWVGGNGIDLHNWHRLGMLFIIAFIIIHLYMVIREEIMGNTTLVSAMFNGFKLVRLIKQPKKN

SEQ ID NO: 10687 - protein, 178 aa, Lawsonia intracellularis
MESIIVLGLGNILYGDEGFGVRVAEQLYTRYDFPDNIEIIDAGTRGQALLQYVEKADRLLILDAVDFNMPPGKIIFKDNNEIPSYLTAHKMSLHQTSFSEIIGLASLQKLLPKEMVLLGVQPISLEYGTSLTPDVFHLLDKAVELALNQLLKWNITPQPAVTKKVFQAAGISLSNFNL

SEQ ID NO: 10688 - protein, 134 aa, Lawsonia intracellularis
MNFSNELNILKINKFCFRKRKKAYQHMQAIAVSLWRLALQNSFPSEYEIIFGAYLCKKNSHIPINKQGILDPYFQKVLQSYIEILNTHGDSDFTEVSSHLINMLQLSKVNNDAIKLKLALTIRTMYNDIFKKLI

SEQ ID NO: 10689 - protein, 356 aa, Lawsonia intracellularis
MQILTITSSTNRSGGTRQAIYQTQEFAKRGYNARLCLPHDSTFWELPKKEQNPLWIALPENHSKQKIFIEKLLSETSPTVIHAFHNKAIKRIAWWGLSWKYKNVTCVAHRGVIYRPKNPLPYLSPAIKAFIPNSKACAKALRWHCPRKKIYIVPNGLPAERFTPTISQEEALKHIGISYIPKFLFGFVGNNKPQKGFDILLEAFSKAHIADAHLLTMGVKEEYWRPLCEQFHIAEQVHFLDHVEHISNYLQLCDAFIVPSRAMESSPNTLIEAMSMGLPIIATNAGGIPELVKGNGIIVPVADAKSMANALAHMLSNPAQREEWSKQSRLLSQQYSITTRCDTLEGIYHKIGAWSN

SEQ ID NO: 10690 - protein, 156 aa, Lawsonia intracellularis
MRLVIQRVHHSRLYIDSNLTTEIGVGLVVLIGFGLVDECSLPNNNICLLFVEKLATLRIFPNKEGKFAHSLEDINGELLLVPQFTLYGDCHKGRRPSFHLAASGKVAKQFFITFYEQLCIRLPGKVQKGVFGADMDVYFENWGPVTILIDSEEYTS

SEQ ID NO: 10691 - protein, 399 aa, Lawsonia intracellularis
METWALILAAGQGSRLLSTIGIAKQFFVWKGIPLYWQSVLQFMHCARIRGVVLVFPSEVKDNEEKVVDRLAAQYDLRLPYIVISGGKLRQDSVKNALNTLPKNCSHVLIHDAARPFISPKLINNVIEVLEAGAVGVVPGISVTDTIKQVIQGEVIVTRPREQLIAVQTPQGFHLKTIVEGHNRATLEKWTVTDDASLLELCGHTVQVINGEIENRKISFPQDLLYMVEQPKTTVPIVGYGYDVHKYVTEDQINQPIRSMRLGGISIPNAPNVVAHSDGDVLLHALMDALLGCIGGGDIGLHFPDSDKRYDGINSAILLDHVLTKVLESSIKIVHMDATIVAQLPKISQYREAIRSNLSRLLDLDLANVNIKATTEEGLGFTGECKGIKAIVIVTAIRIS

SEQ ID NO: 10692 - protein, 97 aa, Lawsonia intracellularis
MGDCHSSRNIVTYILKQPTQEHWPGQPVPLFGLASNGACLARYITITTGRLLLHRFTLTTIINNGGLLSVALAEDHSSWVLPSVLPYEARTFLSINP

SEQ ID NO: 10693 - protein, 254 aa, Lawsonia intracellularis
VSLYINQICQLVSLQHVDDAIYIVEEELIQAPKELETLAAKFESVDSQRTLVIEKLEHLKEREKRIHHEIEDDEGRIKRSKGKLMQVSNSREYQAMAREMDNMERLNRTREEERNTLLEEKQLQETTLAEIESLWTAIKEELELKKAGLDEYLKDAKNRLAELESSRSTTTSDIPRPILERYEFIRRRLSHPVIVPVTDGVCGGCHIVVPPQTYIELQGGHKIINCPNCQRLIYWSKHFSEEEIKQEPVEEIES

SEQ ID NO: 10694 - protein, 265 aa, Lawsonia intracellularis
MNYNNIINIIEEVAPLSVAATWDNSGVQVASSQDEIFCLAVCLDPTPESVYKASELGANMILSHHPLGLRPRFPTIIDNYYSVLKLLLSKNILLYSAHTSLDANLYGPASWLAEVLELHECSVLESIHTTNGVSSQYGFGRIGHFSSPVPVENFCQRIYPLIGEAVPRLIGELPRQIYRVAFCPGAGAEYAAEAARQKADILITGDVKYHQALEFSLPVLDVGHFCLEEEMMRRFSQYLQSVLLDVTVVFVPTQDPLRSFCIKEN

SEQ ID NO: 10695 - protein, 274 aa, Lawsonia intracellularis
MAQVNALVITGYGTNSHNETAHAIRLAGADYVDIKHFSEVVAAEVFLDSYQLLVFPGGFLDGDDLGAAQAAAQRWRYLSDKNGVSLLTSLKNFIAKGGLVLGICNGFQLLVKLGMLPSLDGKLFDRQVSLSHNDSARFEDRWVSLRVNQDSPCVFTRGLSEKNLLSMPVRHGEGKCIVREPSILQQLIDGQHIVLQYADPTTGEATQEYPYNPNGSPFAIAGLTDTSGRIFGLMPHPEAFHHRTNHPGWPRGEQTILGTIIFQNAVDFCRTIDK

SEQ ID NO: 10696 - protein, 550 aa, Lawsonia intracellularis
MKTKFIFITGGVLSSLGKGLSAASIGALLTSRGMTVTIQKLDPYINIDPGTMNPYQHGEVYVTDDGAEADLDLGHYERFLGTSLSQKNNSTSGAIYYKVISKERRGDYLGATVQVIPHITDEIKSTILSLAKSSIDNNTPDIAIIEIGGTIGDIEGLPFLEAIRQLQTDLGRQNCLYIHLTLVPYLGTAGEHKTKPTQHSVKELRSIGIQPNIILCRCEKPIPDDIKAKISLFCDVEKDAVFSAADINNIYELPLKFYTEGLDQKITSFLNLPTKQANLKPWEQLVNTINNPKGKVTITIVGKYVGLTEAYKSLHEALCHGGIANEITVDLQYVNSEIITEDNVNEIFKGVDGILVPGGFGSRGIEGKIESIRYARQKNIPFFGICLGMQCAVIEFARNVAGIEKANSEEFNPVAADKVIYLMKEWYDFRNNAIEYRDSLCDKGGTMRLGSYPCTLIKNTKAFKAYQTDSIEERHRHRYEFNNIYRDQFAEKGMIFSGTSPDNTLVEIIELLNHPWFIGCQFHPEFKSYPMKPHPLFKDFIHAACNHNKQ

SEQ ID NO: 10697 - protein, 268 aa, Lawsonia intracellularis
MTTDDLYHSLVSKHFIFAGPCVLESKELACNSATIIAEQACNTGLLAVFKSSWDKANRTSNSSFRGPTFKEGMEWLYSVKKETGLPIVTDIHLPEQAALVAEVADIIQIPAFLCRQTDLLKEAAYTDCIINVKKGQFLAPWDMKAVRDKIFATGNKKLLFTERGTTFGYNNLVVDFRSIPIMKELGVPVIFDATHSVQLPGGKGESSDGQRQYVSTLAYAAAATGVNGIFLECHPNPDKALCDGPNSWPLNQLGTLLAQLSAIWSVVK

SEQ ID NO: 10698 - protein, 203 aa, Lawsonia intracellularis
MSFNNNNNNNKIANKTLEHQYTHTSFQEQLLKERAHSIRLLILDVDGVMTDGSLYYEDTGLCMKRFNVLDGIGIRLAKEAGLSIAIVSGMDVPCVERRLKDLGISDYHPGINNKHAHIDKLRTQKNLQWSEIAYVGDDWVDLAPMTSVGLPIAVDNAVPEVKELALYITKRKGGDGAIREVIDLLLIYQNKKEALLHTWMNLK

SEQ ID NO: 10699 - protein, 181 aa, Lawsonia intracellularis
MDSLFTTEKKQAGNELLNINDSDPTSVDHSLSLENSLGLALKGVNLSQGENGIELWRLKASWARLSKDRESIQVDSPIVQYLLGDGLNNDAITVRADKGKIVENQNTIILWENLLIAQDNKSITGPYMVYDTKKRHIYFPNGAQFTSPQATSAAGKVTWDLKSNIISGKNGIKVTIHAKNI

SEQ ID NO: 10700 - protein, 189 aa, Lawsonia intracellularis
MKLYFVSQVLLLIGLIYTYNQPTLYAQPIKKGSLGTVETKIFSDELTYDLEKQQITFNKNVHVQRPDFQLTTDTLTIYLAPQKKSQKNEDLSTNPISSKISAGELKHIVAKRNVCIKGDKYTGTAGKVTYTEKTGILLLEDSPVLTDGENTITGDSIRYYIYENRSEVIRGKNKRVEATFMQYSNEKVK

SEQ ID NO: 10701 - protein, 240 aa, Lawsonia intracellularis
MATLKGVELQKWYGNREVVCGVSPVIHQNEIVGLLGPNGAGKTTSFYMLTGIIKPSSGKIFFENQDISSWPLYQRARVGISYLPQESSVFRHLTVRQNLQIILEYTTYSKSKQKQKADALLEDFGLTYLENSYAVHLSGGERRRLEIARALIRQPKFILLDEPFAGIDPLAIHDIQSIIQLLREKNIGILISDHNVRETLNICDRAYLMVKGQVILTGTPDDIINSKKARSMYLGESFCL

SEQ ID NO: 10702 - protein, 473 aa, Lawsonia intracellularis
MGLELKQQLKLSQQLVMTPQLQQAIRLLQLSRVELAETIQKELLENPFLEESQEEIASERQETRTEHDPSEAYDQDVSNTADWEDYLGEFASTPKQLQSREYELSEEMSSLEARYASRPTLESHLMWQLRLSTLTDEQKNLGEAIIGNLSSSGYLQASLEEIANSEHTDIEKLKPVLHAIQRFDPVGVAAQSPQECLLIQIEVLGYDRDPILVELIQNHLDDLEAHRYKPLLRKLHITMEELKEYIDIIQTLDPLPGASYGEGDPTYVSPDAFVYQVDNEFIILLNDEGLPNLHLNQAYEHILEESSDKDKEYFSEKIRSAAWLIKSLHQRQRTLYKVVESIVKYQQTFFKEGITKLRPLILKDIADDIGMHESTVSRITTNKYIATPFGIFELKFFFNSALGVDDGSQVGSESVKAIIKKCINEEDPKNPLSDERIGEILKEQLKVNIARRTVAKYRMSMDIPSSSRRKVHF

SEQ ID NO: 10703 - protein, 178 aa, Lawsonia intracellularis
MNIVFTFKNFEPSDHLRKYARRRLEKLTRFVGKKVSLEIQLLMDVDKFRQKVEVQVVGEGLNISAAETTEDMYGSIDLAIDKIESQIKKYTARYREQRRSGRNKNIDIFPFELIDEDGVRTITGREHFSPKPMDLDEAAMQLETSGFEFLVFLNAETDRVNVIYHRKNGDFGLIDPVI

SEQ ID NO: 10704 - protein, 321 aa, Lawsonia intracellularis
MTLKKIIPNLQKTQNNNNNSISSPLLPHTVQEYFPVIIIVGMSGAGKSTALHVFEDLQLVTADGIPPSLVTSMIHTVQSSSLEHVQGLALGINQHRIHTMQELEHTFQEMRSQHIYFTLLYLEADMPTLIKRYAATRRPHPLEQYHIGLEHALEEEAKRLIPIRQTADIVLDTTTYSIHDLRRFLQKSWNPYPEKIRSIKINIISFGFKYGVPNEADLLFDLRFLPNPYFVEELRPLSGMDKKVATYVLNSASGIKFKKHLIRFLSFLLPLYDAEGRYRITIALGCTGGKHRSVAISELLLHELTKKNYTVSIEHRHMELG

SEQ ID NO: 10705 - protein, 183 aa, Lawsonia intracellularis
MKKLILTFALLLVTNITTFASEPFTLSSPQMKNGTIATNQVYNSFGCKGKNISPSLEWKNPPEGTKSFAITMFDIDAPTGSGWWHWIVYNIPTSTSSLVLGAGNDPKKLPKGAVQSINDFGFIGFGGPCPPVGAKLHHYIFTIYALNVETMDLPATTMPAAIGFNIHMHMIDKATFTATYSRK

SEQ ID NO: 10706 - protein, 498 aa, Lawsonia intracellularis
MKKVLISAFLFVGTLLTASLSAEAIDFKAKGVWDFNFEWQQSSFMKGDGDQRFSPKQRLRTQIDIVASESLKGVVFFELGKTIWGRGVDGASIGTDGKNVIKLRYSYVDWVIPYTDVQVRMGLQPYVLPGFVAGSTILDADGAGVTVSAVFNDYLGATAFWMRALHKNYDSNYGISKLPNFKGTTLDVVGLTIPVTISDIKIAPWGMFAFAGKKSLLGESYGDIEDVRAGLLPAMPAGFGYSWGAGNPFGDVFPNKKRGNAWWVGLSAELAGSSPLHIAVDGAYGRADLGSLRNVVIGDFLLDKIDLKRQGWYAALLAEYKFEYVTPGVIGWYASGDKVDSRGASKRIPTLVGNWSATSFGYSGAYGIGKDSVFGNTIAGSWGVVVQLKDISFLENLTHVIRGARIQGTNNKDVPEHLGLSYVTTIYDTRGGDNMLYLTKKDYAWEVDFDTEYKIYKDLSVALELSYIRLELDKKLWNLQREVDKNAYRAGLNMKYQF

SEQ ID NO: 10707 - protein, 465 aa, Lawsonia intracellularis
MKKVVTRFAPSPTGQLHIGGARTALFSWLLARHFDGIFHLRIEDTDLERSKQEYTDTILESMSWLGLNWDGEIVYQSKRNERYHEVIDILLQTGHAYWCHCSIEQIEKMREEARQKGEKPRYNGCCREKKLSANPSGVVRLKVPSAGQVTFNDLVKGQVTVQNTELDDMVLQRSDGTPTYQLAVVVDDHDMQVTHIIRGDDHVSNTPKQILIYNALGWEIPIFGHIPMILGSDRQKLSKRHGARAVIEYQEDGFLPEAMLNYLVRLGWSYGDQEIFTLQELISFFDGTNLHSAPAAFNIEKLLWLNAHYLRRLPVSQIANLMLPFVRKEGFTHITKERIEAVLPLYVERADTLKELVYLMKPVLISASDLTYKEDDIKKIVTNESKEHLDRLRNLLEAEINFEPLYIEQLIHEYITSNNLKFKEIGPILRLAVSGVLGGPSLQELIVVIGKKEVLARLDKLRFQL

SEQ ID NO: 10708 - protein, 416 aa, Lawsonia intracellularis
MNISKARLNYSRGGKICKLDKVRNKQQQPLFQPIISDLTPFTKQLLEILPYILDKTLHLSHSQRIALPDDIHNLSCLLTSERKGLYKSYWSNARFCSAYLWYFFPWNLIRLTSLISNLALPEPKSEVVIMDLGSGPLTLPVALWLSKPTWRNCKIKLICVDTAIQPMNIGLKLFKQIAAQLKESFVWDVTLIRGNYTQVLKSISSPLHLIMSGNMLNELKGKTNHLIRSRMEQMVMLINNVLHSDGAALFVEPGTRLGGKLMSTLREVAIQDTFISIAPCTHTAFCPLFNSTNNLWCHVLFDVDAPQWLLNLSQAANLSKVKVSFSFQLLRYRKNTLKLLDNTTSFLTGRVLSGGFPVLGMGTAQYVCTKKGLALMSYTRGIPSGARVLCKPLPGNQRDIRSGALKVEWVSTLEKE

SEQ ID NO: 10709 - protein, 446 aa, Lawsonia intracellularis
MHMCSMSELNLQGKQIVLREDLNVPLKDGVITSDKRIRAALPSIKFALERGAGVVILSHLGRPEEGKPTKEASLAPVAARLSELLGMDVPLITDYLNGVTVSPGKCVLCENVRFLVGEKKNSEELARKLAALGEIYIMDAFATAHRAQASTEGAIRFAKHACVGPLMAAELKAIRHILHRPNHPLVAIIGGSKVSTKLQLIENLSRKVDRLIVGGGIANTFLKAAGFEIGLSLYEPELVSTAAKIMRETHRHVSPFDHLGGKLMANAYKQGFPFETLGAKVIEQVSQHMSPFDSLGETTRKEDSRGISSIPLPSDVVVATELSEKATAIIRKVDDIKPDEKIFDIGPETAQRIAEYIMNAGTVVWNGPVGVFEIDQFGLGTKIIAHAVAETKAYTVVGGGDSIAALEKYGYLDKVDYVSTAGGAFLEMLEGKILPAVAALEASASS

SEQ ID NO: 10710 - protein, 294 aa, Lawsonia intracellularis
MDLHIITEPLIDLYDRVAFFWQSPKTQKISSIIILVIFLCALASIELNREGYLPKNLSIIVPTNHFRAISLAFTCILCIELIALVLSISQSLSISVGKQLEIMALILLRNAFKELAYLSEPINMNDSAYHLYTICLAAITSLGIFICLGFYQHMPKLTKYIYNPRERLGYINAKKIVALFLLCLLTVIAIRDTYQHLITGKDVAFFETVYTVLIFADILIVLVAQRFMPTFSAIFLHSSSVVATLIMRLSLSANSPWNAIGAMFSGLYILAVTWAITYFMKKPFSIRKNKHIVD

SEQ ID NO: 10711 - protein, 330 aa, Lawsonia intracellularis
MKVIVTGGAGYIGSHTCKELARQGYNPIVYDNLSTGHKSLVQWGEFEYGDILDLSRLQSVFHKHKPDGVIHFAAKSIVSESVSNPGYYFRNNVTGTLNLLETIYNSKVKYIVVSGTCAVYGQPEQMPIHEDMPKLPVTTYGVSKLVMESMLKSFEAAYGLSWVSLRYFNAAGCDLDGETGEWHEPETHLIPLILKTITSNTPLTIFGDNYPTEDGTCVRDYIHVCDLARAHVLALNYLAKGETSEAINLGTGSGFSVRQIIDSVERITGRSVPYRLGQRREGDPPCLISSNQKAASLLGWRPQYSNIDQIIASAWNWHSNFCNTTFYNNR

SEQ ID NO: 10712 - protein, 258 aa, Lawsonia intracellularis
MKKVFYISIHLVVFWGCIVFFIPPNFANAQKSIKGKSMEESLNNVEAVKILEEGFRRFQKLHFCNPDSPYKKELSEGQQPRVLFISCSDSRVDPAILTEAKPGDLFVVRNISNLVPPCTKEDGSYHGVTSAIEYAVEHLHVDTIIIMGHAKCGGIHSLLLPGSYTGKSFIDRWMSIAKPAKILAEKKFPNAPFEVRQKACEQFSVVNSMNNILTFPWVKEAVKKSNLKVYGWYFDIVSGELLQYDPIKKEFFVLVPSC

SEQ ID NO: 10713 - protein, 452 aa, Lawsonia intracellularis
MSNKSKIDPIITVKQLCKSYPLYTKKQDHLLELFDPFRKQRHTLFHALNSISFSIYKNESIGIMGINGSGKSTLLKLLTGVLTPSSGEISVKGKVSALLELGAGFHPERTGLENIYFQGALHGQTKQEIDSYLAEIIQFADIGEYIHQPVKLYSSGMFIRLAFATAIQGNPDILIIDEALAVGDVRFQRLCFQRIEELKQQGVTFIFVSHSSDQIVAHCSRALLLGNGQLIMDGEPRNVVNRYMDILFNRNDKLSNTIKANVTLPESISTVTEKPTELTTNYDLKDKEKLNDPYSLHPWYNPYEYRWGDGRATISDIHITSSGNINNVQPGDYLSIQLKTVFHTSIIRPIFGCTIKTHDGIIVYGSNTELTGSEILYDHVSAGSITFVTFTMHCNLAPGDYFFSFGVAVMEKDTVPLDRRYDSLLLTVHGPANFFGLSNLNMIIRNSGIKHV

SEQ ID NO: 10714 - protein, 624 aa, Lawsonia intracellularis
MYNVLSQLYNYQAELNIWQCDTPKIFNYSDGDEIEDRLYTILKQVEDKSILSDELQTFQKDWATTYHLSASRANLLRPIEKTLLKDATVLELGCGCGGITRYLAETCAHVCSVEGSQRRASITALRCQDLTNITIISDSIYDLSPKIGSFDIVTLIGVLEYARLFGGEYAETRLLKKACSFLKPGGALIIAIENKLGLKYIAGIPEEHLGTSWTGVMDGYTSDGIVTFNRKELEDLLIQTGFSQLQQFIPLPDYKLPTTVLHPEGIVAEEKEFQRAPLIAASSRSFEEKPLFNIQQVWKGICNTNMLANMADSLCFIAWKTYESDKTIHSWPKNILASHYGTFIQKQYAKETQFIRSDDGIQVLRRHLIPGLQKPNAIFSQLLEEEPYIKGELLIEKVRQLMVKYNWTIEQIAAVLQPWFSWLCSQCIPGTTDLPAELQDIAPFNVVLDKDGAINPIDIEWTSIQSIPLLTMLVRTLSSTFIRIGQVAPPATNVPLKIIPLLHQTICILYKPISMDSIHAAWEDTENKVTCYLGVDCPWETMIHAELSVIPNMPLSMIQSLKTDLCSLSEENKNLREELTSCYNSRSWKLTKPLRFFSNKLHNYRAVIKNFFTFNMLLFIIITY

SEQ ID NO: 10715 - protein, 204 aa, Lawsonia intracellularis
MPLFTRSYSTFWLTLNLVFLLLPACGTKEKSLQSNELLSQPIESQDNTTSKTELPKISLIKPTQGKHISSEFGMRSHPIKRRQLLHTGIDISGKRGDKIIASANGTVVFCGRRGSYGLTIDLDIGNGVILRYAHLDRLHVKKGVEVYQGQCIGKLGRTGRATAPHLHFEVRVNNIPVDPMQFIIPTHHWTKKPQPPSTTTKKEM

SEQ ID NO: 10716 - protein, 367 aa, Lawsonia intracellularis
MTQSLPVLMYHYISNYPSSISVSPHNFEKHCQGMAENGWRGITLQEAESFFLKGEKLPPKSVLITFDDGFLDNFVYAWPILKKYEHSGVIFTVTERILSEQIVRPTLFDVWDKSISNKVLYELVDMPIKQTKLGLKKRQDVFLSWEECRIMEKSGVISIGAHSAHHLSVFANNTWKDIYIPSDQHRTFYKIDAPIVWGMPCFKEKSALHCKAFIPSNKLTELITYHVPQQKQQAYEYFQQPHNITSLKQKIQTLSSNSLGSFETWGQQQKRLISDFEQCKNTLEKELGHNVQSFCWPWGESSIIAQRIGKNFGFSYFYKTSMGANPSKKYTAINRFKVRNKGWNWLRWRLEIYSRIMPATVYAKIRI

SEQ ID NO: 10717 - protein, 346 aa, Lawsonia intracellularis
MTRILSLLSIGAWFLLLWPFPVTTFLATSMACVSYPYFLKLTQKISRYWAIVIYTICLSLLILLPLIITISLIVPQAVAGLKILDQLREPGFLQSINADQMLDSIDRWLKEIPGLEGGVKQLASSIAGIVGSVTRSVLAGGLGIAGGAFHAVLTIFIFIMVTVLCITNAELLYTMIRITSNFSYEVLNRFIVTIRNAIFGVLVGIVLVSIIQGFLCGIGFAVANVPQPAFWGLITAFVAPIPFVGTSLVWIPVCIWLWLQGETVAMVAMIIWCVIVVAGVDNLLRPFFLKTGIDATLIALILSILCGLAAFGPVGIVAGPILVAIAIQASKESLQALQITDRSCNK

SEQ ID NO: 10718 - protein, 1088 aa, Lawsonia intracellularis
LIGTNLVYLLIILIFFYPSPVVSQGSIELPPIEAFIAKWAPSGGSELGSSQSFLLELCDLLEISRPESPRATLVDNTYLFEMPVILTDKNGKITTGRIDLYKRGCFIWESKQGSYKSTSQNKGLHRRGTAIRGTHAWDAAMIAARIQAERYAYALPAKEGHPPFIIVADIGHTIQVYADFNDTGFYAPYPSARENTILLEDLRKPEIRERLRKIWTDPLSLNPSRENEKVTYQLVLTLSDLAQSLENEGHDPDVVALFIMRLIFTLFAEDCGLLPFNSYTQLLARLEKTPEQFASATTDVWKAMKTGGNSTALGKQVVCFHGHLFEDAEALPLNKEQLAIIYKAAKANWSGVETSIFGTLLERALSPKDRYKLGAHYTPTAYVERLVIPTVVDPVREDWENVKLLALSHVVKGSHKEAIQEIEVFHKRLSETIVLDPSCGSGNFLAVSMNVLKDIEGEVVQSLKDLGLSENEIQKKGYSITPKQFKGIEYNPRAAFISELVVWISYLQRHYKVYGNVQPPEPIMDNIQFIECRDAILTWDSIKKGKDSLGNIQETYINPRPADPWPKADFIVGNPPFIGNNRIRSALGDGYVEALRSAYPMLPKNIDYVMYWWHRSALLLRENKVRQFGFITTNSIKNPSNRKIVESYLENKPQLSIVMAIPDHPWTGAKDAARVRIAMTTCSLGDKQGILYTSIHEKQQDGFVEVTFNSSQGKIHANLSVDVDTTKLVPLKANKGIAWSGVSIRGKHFIITLDEAKKLGLGTIPGLEKYIKPYMKGRDLAGISKNTYVIDLFGLSINEVQQNYPTIYQWIATKVKPIREKNRLAFRRNHWWLFGSQGIGLRNAINNFKQYIATPRTAGRRYFAFINKLVVPDDSLTVIASDDPYILGILSSKFHSVWLTVTATSRGLKPNTNDVYNKICFDTFPFPQATEQQKNRIRSIANMLDTHRKERQKQYPYLTLTHMYAIMEKVQHNVPLSSKESKISLQGDIYNLLRLHTELDEAVAEAYGWPKDIKTHEALSRLMELYNIQAEEEKAGIIHWLIPEYQKQYDGLVSISDYSQLTSMTKQFLPLFDMNIEKHIIKGNQYTN

SEQ ID NO: 10719 - protein, 134 aa, Lawsonia intracellularis
MGALPNPLRPSIGIQLAPPLVACEAYLFVNGGHTDIFSQILFGYGLLQLIFLLWLLLWTFEQPFSVSFWAFSFGVSALSVSSLHFFIENPESVVGQMAIPIFIFSNGVIALLILGTLLRIIQGKFLLSTPVASK

SEQ ID NO: 10720 - protein, 133 aa, Lawsonia intracellularis
IKEVIMLEPFSPIKTFPIPAAYLGMVLGISGMGTAWRIAAKIWQISTLWGECLMLLAGVVWLVLAIIYITKWIWYRPAALAEVNDPIQCCYISLFPATTMLIGAGIYPYFHTVALWFVVVGTIGQLGFAAYRS

SEQ ID NO: 10721 - protein, 916 aa, Lawsonia intracellularis
MEHPEVAFSLAAMQVIRRNGDIVSFKSEKIAAALTKAFIAVKGEQSPLSSSLRDVVTHLTETVISALTHRFPDGGSIHIEDIQDQVERALMQSGEHDVARAYVLYREKRAAMRNTSEKKAVLHLVDKGEKKVLDHTWLMNICHVACKNLTSVSSISIFNNTLKSLYDGMSLADVYSSLILSARTMIEYEPEYNKVTARLLRLSLAYEVLDQSTELMDLHQLKIATISYFPKFIELGINAGLLDPRLSTFNYSYLAQALVPERDELFGYIGIQTLYDRYFLHIKKRRIELPQLFFMRVAMGLALNEKKKEDKAIEFYNLLSNFDFMSSTPTLFNSGTIRPQLSSCFLTTINDDLENIFQSIKENALLQKYAGGIGNDWTPVRALGSPIKGTNGQSQGVIPFMKVANDTALAVNQGGKRKGAVCAYLETWHLDIEDFLDLRKNTGDDRRRTHDMNTANWVPDLFMKRVLENSDWTLFSPNDVPELHEKFGLEFEKFYTHYEAKTLTGEITLFKKVSAVQLWRKMLTMLFETGHPWITFKDACNLRSPQQHIGVIHSSNLCTEITLNTSKEEIAVCNLGSINLSSHLINGEVDQNKLSQTIATALRMLDNVIDINYYNSPKASYANLQHRPIGIGIMGFADCLYKLGIPYASHQAVEFADRSMEIVCYYTYWASTELAKERGAYSTFPGSLWDRKILPLDSLDLLLKERGGFLEVDRSSRLDWDALKDRIAKYGMRNSNCVSLAPTATISNIIGVSQGIEPAYQNLYVKSNMSGEFTIVNEYLVNDLKKLNLWDEAMVADLKYFDGSVAYIDRVPDSLKKLYATAFEIDPVWLIEAASRRQKWIDQAQSLNLYLDTPSGKKMDEIYKLAWLRGLKTTYYLRSLGASQVEKVGTNSQSVLKKDTVLRACSIDDPECEACQ

SEQ ID NO: 10722 - protein, 333 aa, Lawsonia intracellularis
MPVNASDKRIVNGKTDINQLLPFRYPWAWDFFLKANQNHWTPLEISMSQDVYDYNHTLTTNERHVFDNVLAYLTTSDILAMRNIGLAVMEKMTAPELQIYQARQVYEEALHTWTYQHCIESLGLEQSEIYNRYRVVPEIYGKILLSNKRLEQVLRSDINLSDKDNLHEFIMSYIFFAAIFEGCWFYNGFSPIFSLQRRGLMKGTAEQFQYILRDEVLHCTFGITVIKGLIEEENITLDPTAVRQLWDEVEAAEIAYANYILHEPIIGYNADLHIGQFRFIANRRSRQLGMKEPFPGAKNVLPWLDEQSNLRKEKNFFETRVTEYQTGGGLKWD

SEQ ID NO: 10723 - protein, 382 aa, Lawsonia intracellularis
MLVMPGLINAHTHVAMTFFRGLADDLPLMEWLKSYIFPIERHLTPETVRWSSLLGYAEMLRTGTTACLDMYFFEDVVFEAAIKAGIRCTGGESIFVFPSVSCDTAKTALEHTKKMAELYSDNTRINVVVNPHSVYTTTPQVLSQCIEVAEECSLPLHIHLSETTTETQICLQKYGLRPVSYCRDLGILTPRTTLAHVVDVNLEELTCLAEHGCVISHNPSSNMKLASGVSPIPEMIKRNLSVGLGTDGAASNNCLNMFMEMGRCALLHKVYWNNPTALFAQTVLDMATLGGAAAIHQPKLGVLAPGHPADLIALDMSMPNLQPMFNPISHLIYATTGMEVFLTMVEGEILYYNGTFTRFDYDSLSNEMKKVSHWVKEKLQLL

SEQ ID NO: 10724 - protein, 478 aa, Lawsonia intracellularis
MNFVTLEFCIFFPIVLFILYLSCYHLGIYKGALLAGNIFFYAYAGLTFLPLLFTVIILNWCTGKFLFSSKTTCSKKIIITINIILHILILAFFKYYEFIILSLESIFSLGRSIPITLPMIDIFFPVGLSFYTFQGLSYSIDQYRNPTSHPESFINVSLFISFFPTILAGPIMRGHQFFPQLGKCNYISDELITGFALILSGLFKKVVLASYLSEHIVRDVFQSPGIYSSWTILTAVYGYSIQIFCDFSGYSDLAIGIGALMGYRIPQNFNAPYLAYNLQIFWHRWHITLSQWLKDYLYIPLGGNKKGNRYINLIITMFIGGLWHGSHLRFLIWGFLHGIGLALVHFIKTVCASQTNVQYLLNIPFIKTIHYIISWALTFHFVSFLWIFFRAEDVPCALEIIKRIIIFGQEGEGFPILVIPVILTGLLIQVVGPYILTSFTKFQKRLHWIIQTFVLAFIAGIILKMGPDGIMPFIYFQF

SEQ ID NO: 10725 - protein, 653 aa, Lawsonia intracellularis
MVKQKKITSTQLTPSRSIIIYIVTLFILLLLDTGRVIPILNRLSSDFPSISIAAQFIQKTAEISKLTELSAFESTIIKQVSLNTVIGEIPVHNSYPQQEKGEEDTSHSHPEKFEEACKMQQDAVMDHTEPHLTNELSPPLTSTPNLEGNKSETLSTSPINTIDQSIPTNNNNTILIIGDSMINEGLGPVLQKTLHNQYPFKVIREGKYSTGLSRPDYFNWPERLTFLVNKHHPKLIILCLGANDAQDIFDDKNHRYHPGSQEWKKIYTNRAKHLLNIATSQGAYVIWAGLPIMGKVPYATRIQYVSECQKKACDETVNTQFIDTQSVLATPQGKYTTYTQESNKHIRLRAKDKIHVTEAGGRLLMNHLMPYIKQSLETITVNNTKDNKQDLYTSNAENDIVIYIPSSIQQASIPCSVFIPQNKSQEKYPVLLLLHGVGCTNEIWKQMTGDLLQQLATFHSIVIIAPDGGKNSWYVDSPLIQTSQIESFIINELKPTMLEQLPIIDKWSIAGISMGGHGAITLGLRHPMLYTSMSAINGVLNLMVHPHEWGIKNVLGELSDSQQLWESYSAYHLIDNISKEDVPPMLISINLTDPALDENRCFFHKATKLNLPIQYSETSSDQYWDYCLYQLPIHIGFHAKKLHHHNELSQNND

SEQ ID NO: 10726 - protein, 125 aa, Lawsonia intracellularis
MIKDKKLVIVIPSEFPGGLAARLSPHFAYCETYTLTTIKNNVVLHVTTRPNIIQESNVKRAIQNIAELQTNILIVRGIGLHPLAILQQKGIKIYYSKNLPTVSTVLSSFLQGMLIPYNQSPHTSS

SEQ ID NO: 10727 - protein, 282 aa, Lawsonia intracellularis
MYIIIGYFIVIASIIGGYLMAKGNLALLFQPAELVIIIGAALGAFFASQTKYSFTLVIKNLSHIFGDPNSTKIKYLETLALLYGLFLKMNREGVISIESDIEKPESSPIFSKYPTIVKDTKVVAFIADTLRVYLTTGAPEDIDNLMESDMKITHEEELLPAHSISHMAESLPGMGIVAAVLGVVITMGKINEPPEVLGHYIGAALVGTFIGILFCYGFFGPMGSKLETSAEEAHFYYNSIKEAVAAAIRGSTPMIAVEYGRRAIPNTFRPSFSEMEERLKTG

SEQ ID NO: 10728 - protein, 237 aa, Lawsonia intracellularis
MSGSWKVAYADFVTAMMAFFLLMWILAMTPPEVKEGLAAYFSSSDATFKTPDSSPISNNPLINQIDKLDTRQLKINETEQSHYALANKLKKMLMADAIPQSATGISADDVGVLLRVNSNSTFLPGTATLTPEGKKVMGTVLAVLREYNLYLVIRGHADIGEITKGSPFASNWELSGARAAAAAQYLVEHGIKASRIRSVGYADTRPLEPSSPEGSTKNRRIEFYFHRPEVMSYGVVY

SEQ ID NO: 10729 - protein, 568 aa, Lawsonia intracellularis
MSFLWEKAFSQGAFPWKDVDCFSCKIDIDNLETFKHYLDFVQIKFCLLKEWSTQPQYPLIEHRELLPSFEAELLEYKELPGFSMVAFARPLESFNEIFQYDILHSCDPLNSIPGKEEKEAELKCIAHNIQTFLTRLPKNNQDAFKQRFQHVDISSLDYYPAILPYLCHMDRAHVFATDPLGYYYLAGIFGSFPSDIDGEIKRYGLKIRKFQLGNNSLYEQNRLFVYQFLMELYGFPVASERRTSAALFSRRLHKMGEHFMVRVLGQSDRVITTIWNNGGNRLYPRVEKVALIRVEPGQKEVIERLSKGSYFVDPKNYIAIIRIKYKQHRYNHDNVRQERALSVESQEIIHPLTGEILEDVNIIKDTSTIILHLNDIVRGEYVGRIVYKRNELIENTETEEKRLKFLFAWLSKNQRRLVSYSDEFFTSMVKILEGYLHAPNHKDLFEEYGDLYHEVMNKYAYIRQARMVKHLEDIMSRNVKGVRISYNKMLLEAVKILRELKFELVTYFDQITATVIHHIETILDDRYLRRTYIENPKKELTPAGYEIRKNYGRLVSLHDTFISIQSSR

SEQ ID NO: 10730 - protein, 384 aa, Lawsonia intracellularis
LIKYKVLFFSISLLVVMGVTIPLPVLPAIAQRFMLTTEQVSWVTVAYTSPGIIMALIAGVLADRLGRKAVLVPGVLLFGIGGLLCAFSLNFTMLIIFRVIQGMGGGVIGVLYATLPADMYHKEDLPKIMGQISAVASIGIAIFPTVGGLLGEIVWHAPFWVSILAFPVAWLSFYLPLVKGSSSVKWKKYFIDTKEIITNQKALILFSLTFLSYCIYYGPVNTYFPMMAHIRFYVSPAEIGNIFIILAIGIGMSAFSLGWLNNHVQFNILLLMAGFGYFLAQFSFIIMPSMKWMIVPLIFEGLAQGITLPIVAERIAILAPTNNRAAVMAVNGSIFRFSQSVSPLIFGLAWTLWGWHGPYILGVLFSILIISIVLFIVRKKFNTI

SEQ ID NO: 10731 - protein, 250 aa, Lawsonia intracellularis
MDIATLLGIVFGFTLVLVAIFIGPVPGKFIHVPSMIIVFGGVSASILISFPFEDVRQAISAGVKAFSSKKTKASDVVTTMVKIAEISRREGTLALERIQTDNPLLKKATQLIADNADPSLIHDTVAIEIASLKRRHKVGINVFQKLGYLGLAFGMIGTLIGLVQMLATMNDPSELGEGMAVAILTTFYGSIIANLVFIPIADKLKAKSLQEELILFIIFEGAKSILENNNPKLVYEKLSSFLPPKERIRA

SEQ ID NO: 10732 - protein, 206 aa, Lawsonia intracellularis
MSSLDKEKFDSSFSAIRDTFGGDQQKNITTKQTIKESEVADFLKLREEMIAAQKNTFDAIRSFITEHALGDNIKATFDNGIITLRLPDEVLFAPGSEQLTPQGEKALSQLRDLFLKNREQSINIKGYTDNSSVSEGARFHNNWELSALRAVNVLRKLLQGGIEATRMTATGLGDLDPLAPNDTPENRAQNRRVEFTLERKVTNPLQ

SEQ ID NO: 10733 - protein, 472 aa, Lawsonia intracellularis
VKKIRHKVLIANRGEIAVRIAQACRKLGLDFVCVYTAEDLASGHVLMAKEFGTSQSLYKIASYHDANEILSIADESGATAIHPGYGFFAEDFRFARRVTTRTRNLIFIGPSWRVIRELGDKINTKRLARSLKVPTVPGSDKPIYDEMEAEKIARILYSFQVQQGIQRPLVLVKASAGGGGMGIEEVYDIDQFRAVYRRIRNYALRQFKDEGVLIEQRICNFSHLEVQIIADQSGKKPVHFGTRNCTIQSTGLQKRIEVAPGFYPQTIKYNFNAAKVLEDITNYSLTMAQKVGYNNVGTWEWIVTHKGNPFLMEVNTRIQVENGVSARIARIHGKDGVDLIAEQIRIALGEPLGYTQNDISFEGVGIEYRLIAEDPDCKFTPWVGCIDTFSWKDQPWLTMHTHVPTNKPYEIPVEFDPNLALAIIWGKDLAEAQQRGLKFLNQLSLKGKNQQGETLKSNIQFLKSNTERILQF

SEQ ID NO: 10734 - protein, 748 aa, Lawsonia intracellularis
MDIEKQIYHLTERLNYLKDIFAGKHAKVIELLQGRLATFTNRTNGETQQDPSAEIGTLEELFTFMEHKLETKLTPMDKVRIVRHPQRICLHDILENVYDNFTEIAGQQEHSIDPSMLIARATITRRRGKKTYNQFIMVIGQEKGHGEEFRNGGSVKPWGNSKALHYMKVAETEGIPIHTYVFTPGSYPIEDTPGAAQQIAKNLYEMADLSVPIISIISEGGSGGAEAIALADKRLMLSHGYYSVISPEGAAAIEGKLKPGERATPELIEFCANQLHMTAKDNLSFGFIDGVIQEPDLGARPHHYDFFRKLRQEVIRATDEVVLGVRGLGLFRRIALNRLGKEDINIDEMYVGWNLNLKSCARLVSKRQKKFITLSKNSCLDQRPFFNKFHNLLNDSIGTLVSKTRYFFYTKCQRKIRFVFDEITSELHLVKSRLTAPLCRIRPPKRQIEEAVVHQLTTLSDWDDTESRKGRWSYISPRATEDRSISCPNAATHGCFDLWAPDLFGEFAGVCTSCGHHFPMEYQWVAKNIFDENSIREFNTEIEAINPLKFTKFDEKLIEARKKTKLKSGCITFEATIHGIKTIVAIFVGSFRGGSVGAAEGTKFVKAINRATKKRYPFLAYVHGTAGIRIQEGTHGLAQMPRCTVAVRRYINAGGLYIVLYDTNSYAGPVASFLGCSPYQYAIRSSNIGFAGRGVIKETTGMDIPPDYHNAYKALARGHIQGVWDRREAQANLKQLLLTVGGRNLYYR

SEQ ID NO: 10735 - protein, 216 aa, Lawsonia intracellularis
MLDITTLLEHIKKSPYEEVTISSPHTGIVTFNTLNIGDKVNGPSGTWKEKSGTLLATLTRERNSKPIYSQQKGYVATIHKELEGTFVQAKTPLLVIRHFLSKDEVLQLILQKALHIFSAPERAKYYFTQQVDAKIRTAGCKSVMVYDGMELFIVSRMKRETPLHYSGPEGIIYATYFQHNENVNVGSPLIGICPQNQLQQIEDVILKVQTEWQEQE

SEQ ID NO: 10736 - protein, 114 aa, Lawsonia intracellularis
MGKILQIRVSAWTYREEDVAITWPNLTELTWPTPPYHGEKRGVLELVDSLENQLSFGDWPTTIKNTLHQGIQNLVQTKKKLELALADWKPKEANDLSNILEDQLTELNQKVLLP

SEQ ID NO: 10737 - protein, 151 aa, Lawsonia intracellularis
MLNKVMIIGRLGRDPEIRYTQTGSPVCSLNIATDESYTDRDGNKVERTEWHRVSVFQRAAENCGQYLSKGSLVFVEGNLQTRKWQDQQGQDRYTTEIKAQRVQFLDRKGADLGQGLYQQEQPVSSTNTQQNGFEDISPFPSEASGMDDVPF

SEQ ID NO: 10738 - protein, 565 aa, Lawsonia intracellularis
MKKEDISHNVIIGKDFLRARIIQDIESGRFDKRVHTRFPPEPNGYLHIGHAKSICLNFGIAKEFSGQCNLRFDDTNPIKEEVEYVDSIREDVKWLGGDWQNREFYASDYFETLYSLAEQLISLGKAYVDSQSADEIRETRGTLTTPGIESPYRNRSVEENLDLFRRMRAGEFPDGLHVLRAKIDMSSPNIVMRDPTLYRIRHAEHHRTGNDWCIYPMYDFTHCISDSLENITHSICTLEFENNRELYDWILTTLNMYHPQQIEFARLGLTYNVLSKRKLIQLVHEGHVDGWDDPRMPTISGLRRRGYTPESIQNFCSRIGVARSENLVEYSLLEFCVREHLNATSPRVMGVLNPLKVVIENYPDDKIEWIDMPYSSDNTIPGSRKVPFTRELYIEQDDFREDPPSKFYRLYPGGEVRLRYTYYITCTEVIKDSEGKVIELRCTYDPNSKEVEKTDKKKVKGKIHWVSASHSIPVEVRLYEHLFTLADPSTASEGTHISELINPDSKQIVTGFVEPSLKGSKPGEKVQFERVGYFCVDPDTQGDRLVFNRTVTLKDSWAKIEKKDT

SEQ ID NO: 10739 - protein, 125 aa, Lawsonia intracellularis
MKKWMVICFLVWFVSPVMAGSRFDDIDLNKDGYISWEEFQTVFPNLKKVAFDAIDTNKDGKISREEWERFQKSHEQNVQSEEGKKEMDNVKMHQRSPEELTDSEQPKTTSTKSHMKPLVQPPVTK

SEQ ID NO: 10740 - protein, 378 aa, Lawsonia intracellularis
MKIQYSSISKSSLRRVLHVTPSLSLGGTEKTAQLFATYLNKKYFNVAVWSPSSGPRADILKNAGIPVWINIPLEAVLYRFKPHIVHLHRAGWPEPKLMRAFRGTHWFHHGVKLPKIIETNVFGRHDPSHSGRIIDKTLFVSHFCAERFSNAYKEKVPSNRYNVLYNPVDVMFIAKHTTPPEKKNFRNAVIGRLSRADKGKWSISFGLHIIPTIISQIPDLQYYIVGGIQEAYDFVTTQNLSNNISFLPEITTELELANYLDKLSIFVHANDTGESFGLSIAEAMSAGLPIVTHPCLNFKDNAQTELVEHGVTGLIATTPKEYADFIIMLLKNPDIAQRMGIAGQKKAFQLFDVSLLTHKLEHIYHNLCPPNLACAIPS

SEQ ID NO: 10741 - protein, 379 aa, Lawsonia intracellularis
MKFAVMFGTILTIILLYGAIIPSHASEPIKIGVYLPLTGQNAYGGQLELDGIKLAHDLNPVVLNRPVQLFIVDNKSDKVEAANAVKRLIDQDKVCVIIGSYGSSLSLAGGEVAEQAKIPVIGTSCTNPLVTQGKKYYFRACFIDPYQGAAVATYATKNLGVKKAATLTDVSSDYSVGLTAFFKKAFVHQGGEIVANLKYNAGDQDFTAQLMDLIAKKPDLLFVPSYFSEGAIIIKQAKELGATFILMGADAMDNPDTLEIGGQSINGFLHTTFPYDIHMPHMSQEATKFTQAWRKTFPYKDPNVNSALGYNCYNIVIDAIQRANSSNPEAITHALENTKNLPTALGILTINKHHDAEMPVGIIQYQNGKRVYLGEVTGE

SEQ ID NO: 10742 - protein, 297 aa, Lawsonia intracellularis
MILNIFFQHFFNALTLGSLYGLIAIGYTMVYGILRFINFAHGDLLMLGAYCLFYGTTLFLLPWKISIIIAIFGVSLIGMLIDQVAYRPLRDAPRTSILISAIAVSFFIESSAVVLFSGLPRPVFQPEWLISPFSISKIRILPLTLIVPIVSFFLVLALLWIIYKTKFGLAMRAISKDIETTRLLGVPINRIIALTFALGSALAAASGIMWSLRYPQINPYMGVFPGFKAFIAAVLGGIGSIQGALIGGLLLGFIEIMTVAFLPTLSGYRDAFAFIILILVLLIKPTGIFGEYVEEKI

SEQ ID NO: 10743 - protein, 347 aa, Lawsonia intracellularis
MNSSTRNYIFNVLTIGVIVLFLLWAESTFNGYQIQLLNLIAINTILALSLNLVYGFTGMFSLGHAGFMAIGAYISALLILPAEQKEIMWILEPIIWPFSVLETPFWFSILAGGLVSAFFGLLIALSVLRLGGDYLAIATLGFSEIIRVILINVASITNGSLGIKGIPSHTDLFVTYGWLFLTLFFLIKLLQSNFGNIFKSIRDNEIAAKVMGINTLHYKTLSFTIGAFFAGIGGALLGNLLTTIDPKMFTFLLTFNILMIVVAGGLGSITGSILGSIIITILLEWLRAVESPFNFGSYQIPGIPGMRMVIFSLILLGIILYRREGIMGMKEISWTNITKFFSRKRDI

SEQ ID NO: 10744 - protein, 268 aa, Lawsonia intracellularis
MKEYVQQKNQNSILELQNIVIQFGGITAVNNLTMNVEKGSIAAIIGPNGAGKTTAFNMISGFYTPHKGNIFFKGKSITGLPPYKICQLGMARTFQNIRLFSNETTLENIMLGCHVRRSSYWWMPVIGVPSAIREEKKIKGQAMELIQRFNLELYVNEKASSLPYGAQRRLEIARALATYPELLLLDEPAAGMNPQESIELMHLIKNIRDEFKLTILLIEHDMKLVMGVCQYIWVLEYGQIIAEGIPQKIRNDPKVIEAYLGGEETHYA

SEQ ID NO: 10745 - protein, 240 aa, Lawsonia intracellularis
MLNISHLHIYYGGIHAVQGVTLSVPKGKIITLIGANGAGKSSIIRSISGLIKQVTGSIVYTNDNISMPQQLLEHSPEDIVRLGISMSPEGRRILPHLTVLENLQLGAYIQKDANEIQKDIKWVYSLFPRLQERSWQKGGTLSGGEQQMLALGRALMSRPSLLMLDEPSLGLAPRLVKELFDIILQINAEGKTILLVEQNAFAALSIADYAYVLEVGNIVMEGNGQELLNNPKVKEAYLGG

SEQ ID NO: 10746 - protein, 691 aa, Lawsonia intracellularis
MFLSFSIVIACGLYALYYAYTTSKQVFSADIGTEEMQQIAGAIQEGAQAYLNRQYRTIAIVGIIITILLAIFFSFLVALGFVIGAFLSGLTGFIGMNVSVRANVRTTEAARSGLAPALNIAFKAGAITGMLVVGLGLLGVALYYGLLSMFGVDQKSILEALVALSFGASLISIFARLGGGIFTKGADVGADLVGKVEAGIPEDDPRNPAVIADNVGDNVGDCAGMAADLFETYAVTVVASMLLAAIYFTGKLQSIMMMYPLLIGGVCIIGSIIGTKYVRLTKDNKIMKALYRGLIATGITSAILITLVTTLLFWDVPTMSAQGKSFGIINLLSCSFAGLIITALLVWVTEYYTSTVFRPVRSIAYASTTGHGTNIIQGLAIAMESTALPVLIICAGIVFTYANAGLFGISIAATTMLALAGMIVALDAYGPVTDNAGGIAEMSNLPSEVRTVTDALDAVGNTTKAVTKGYAIGSAGLAALVLFACYTEELGRFFPSLNIHFSLQDPYVLIGLLIGGLLPYLFGSLGMMAVGRAGAEVVVEVRRQFSSIPGIMEGTGKPDYSSAVDMLTKAAIKEMILPSILPVFAPIIIYCIIYWIGGQNAALSTLGAMLMGTIVTGLFVAISMTSGGGAWDNAKKYIEDGHHGGKGSEAHKAAVTGDTVGDPYKDTAGPAINPMIKIINIVALLLLQALA

SEQ ID NO: 10747 - protein, 394 aa, Lawsonia intracellularis
MSFNTGEFEYSGPPPGNSSSLWLKLLLIIFVIFICVIGFIGYQIFSFLDTPGSTPGKEIEIAIPPGTKFHVLSLYLQDIGAITDVNKFEILAKWKGMSDKVKSGRFLINTGWTPQALLDYLVTGSPLLNRITIPEGLPWWEVGKRLEKAGFVRFEDFKTVIHDPEFLRYWGIPFHNAEGFLFPDTYLLARPFKQNVESAKIIVGRLIDTFWRKTAPLWPNGMRPSFRNASVIKQPLILASIIEKETHFPGERRKVSGVYTNRLAVGMPLYADPTVIYGLGENFDGKLRRSQLQDKNNPYNTYVNKGLPPGPIASPGLDSIRAALNPEEHNYYYFVARGDGSHVFSTNLDSHNRMVKIYQLPLRKGDTGSLIHGGVAPSKVQEDLLPLKETVPPS

SEQ ID NO: 10748 - protein, 142 aa, Lawsonia intracellularis
MKYVAIDYGTKYTGIAVSDSMGVFAFPKQSIIMTTQKEFFIKLVELIYVESPDALVVGLPVLFDNSETLITRQVRNFIKRLKHKIMLPVFLMKEILSSYEAKLDLQSVGYRKNKIKSVLDQQAAVRILQSFLDQSESERVQV

SEQ ID NO: 10749 - protein, 260 aa, Lawsonia intracellularis
MQDDTFQLGNVKLKSRLFLGTGKYGNDAIIPDIIKSSGAEVITVALRRVELDNKKENFLSYIPRTIQLLPNTSGARNANEAIRIARMAQAAGCGNWIKIEVISDSRYLLPDGYDTAKATEVLANDGFIVLPYMNPDLYVARDLANAGAAAIMPLGAPIGTNRGLMTKEMIQILIEEIKLPIIVDAGIGKPSQACEAMELGAAACLVNTAIATSDDPILMAKAFGNAIQAGREAWLAKTGPVLTGKASASSPLTGFLDDSY

SEQ ID NO: 10750 - protein, 363 aa, Lawsonia intracellularis
MFNSVTESQVSHTLNLAERGLSLSIEHLLILLSPTATSFLEKMASIAQEQTIRYFGKTIQLFTPLYLSNFCINNCKYCSFSATNRIKRIQLTIEEIEKEAAAIAATGLRHILLLTGDAPSKATIAYLKEAIQCLNNYFPSVGIEIYAIEKKEYELLECTGVDSMTLFQETYNEKRYMALHTKGTKQNFRFRLEAQSRAASAGIRFITLGALLGLDHWWRDIFYVGLHANWLQNEYPGVDLTISVPRIRPHEGYFSDYYPVSDKNLVQAIQAIRLFLPTSGIILSTREKPSLRDRLISLSVTKMSAGVSTAVGGHTDHHIAKDNIAQFEIADTRSVEQIITAIKAKGYQPIFKNWIKLSNAPMH

SEQ ID NO: 10751 - protein, 206 aa, Lawsonia intracellularis
MSTFHWKNVMDEHLPESLQTKLSNATIGIAGAGGLGSNCAVLLTRTGIGHLVIVDHDIVSVSNLNRQQYLPSHIGMPKVEALKEVLLNINPGLKLTIYQQYMNPNNILTLFEDCQFVIEAVDNAITKKMLVETLITVDYTVISASGVAGWGGLPMTQKQLGKKLLVVGDHTYGVSSINPPLAPRVNMAASMQADAILCALLNTKND

SEQ ID NO: 10752 - protein, 384 aa, Lawsonia intracellularis
MSIAKSPFILGGTSPEHAKVFKRTSGQKIDNESFSEMVGKTSEVTVETQENSKDTKGLNVISRLFANGLAMGEAQHQQNEMVMQSILPQNQQHKNSVPLTQAVSGIPLHKENKGIPFSKGIPLDAKRDIIFSARNIALNRKHGGMNTQQTISRSKTELNTANITLNKTIQNETRIGQLSARFESGNEGISAIGYDRTGGTSYGKYQIASKPGSMDQFIKFLERENPNIAARLKSAGPADTGSRDGKMPQVWRSIAQEQPELFEDLQKRFISESHYQPALKGIKAAGYEVESLSPAMHEVLWSTAVQHGPSGAVRIFTQSANMVGISEGQSIGDQEEQQLIKSIYELRGTLFGSSTAEIQASALRRMQDEKNLALAMLQPNKTIV

SEQ ID NO: 10753 - protein, 457 aa, Lawsonia intracellularis
MKKQYYFRELKTQIQLTIPIVLAQIFMTAMGFVDMVMTGYVSAMDMAAVALGSSIWVPLILFFQGILQALHPVISQWRGEGYTEHIGHVLRQGIWLATFLSLPLFFIAYILSFQMGKLGLEEQLADLSGQYLRAIAWGTPGFLYFVVIRCYFEGMAFMRPSMIGGFIGLLFNVPLNYIFIFGKCGLPALGGVGSGFATGIVYWVMFFVIFCYAMTLPDVRRFLSFKNWVEWIDKKTQWQLLRIGFPGALGVFFEVTSFAIIALLVAPLGVTIIAGHEIALNFSALLFMIPFSLAITATIRTGYSIGRHSYEMLHCVSFVSLSLGLFIALCSIIFILTLRYEIAGIYNNDVEVLKVATSLMIFTAINQCFEALQAITMGIIKGYKDTKTVFYITLFAYWFFAIPVGYILGRTNWFVEPMGVTGFWLALLGGLSLAGVLGLWRVTILEHKFYKKVSKGL

SEQ ID NO: 10754 - protein, 477 aa, Lawsonia intracellularis
MSSIVYFFLSLIALFLGYIIYGKVVERIFGADYSRVTPVYKMFDGVDYVKMGPFKIFLIQLLNIAGLGPVFGPILGALYGPIALFWVVIGSIFGGAVHDYFSGMMSLRYNGKSVPDIVGYNLGSTIRILMQVFSVVLLILVGVVFVAGPAGLLEKLTGIDAMFFVSIIFAYYFLAMILPIDKLIGLIYPYFALLLVFMAIGLLVMLIVKGYPFYPSINLINQHPAGLPIWPMVFITIACGALSGFHATQSPMMARCLPNERYGRPVFFGAMIAEGVIALIWVTLGMSFYENSSALAAALGPEGNAALVVDEVSKVLLGTVGGTLAILGVVILPITSGDTAFRSARLTIADAFGFDQASGKNRLLLTIPIFAIGVALNFMSFGILWRYFGWANQTLAAIVLWAAAAYLLHRERFHWIATVPAMFMTAVCVSYICFEENMGFGISYDLSNIIAITFSVLCGITLLTVGRKRQPDEPIDS

SEQ ID NO: 10755 - protein, 326 aa, Lawsonia intracellularis
MLGEYSITEIIIFLIIIVSCLWFDLHAHKSDKVISVKNAFLWSSIWISLALLFAIYIGCMFGLEKAQLFLTGYLLEESLSVDNLFVIMAIFASFSIKDEMQHRVLYYGILGALVMRLLFVAVGSSLVTLFGPYALASFGIFVLWTAWKMWKEQKKKHSEIIDYSKHWSVKIARWLMPVHPQLDGHNFFIKVSEHNRLIWKATPLFLCLLVIEFSDVMFAFDSIPAIIAITQEPFLIYTSNIFAILGLRSLYFLLAAAKRYLRYLEKSIIVILAYIGFKMLLDVVGIIHISPLVSLGIVIICLTIGILASLFIPQTTTLSHNNTIHT

SEQ ID NO: 10756 - protein, 160 aa, Lawsonia intracellularis
MQYWLFKSDTDCYSINDLQSAPNQTTSWDGVRNYQARNFMRDEMRIGDLGFFYHSGKLPEIAGIVKVVKESYPDHTAQDPENDHYDPSATPENPRWYMVDVQLVKVFHPTIPRNLLRLQHDLSGMELLKAGSRLSIQPVSQEHFNNIIRLADEIQKANTN

SEQ ID NO: 10757 - protein, 481 aa, Lawsonia intracellularis
MIKVKKFFLNFTTRRTLILVCSDCIALLSTVIIAAYIRNIFTPVEFSQHWTLLLFLLVAIFVNYMKELYDATPPPLPEEVKSLSLSVSLAYFCIAIYLFFFRADLPSRLVYMASWMASLIVVPVIRCNVRQYFSRKSWWGIPTIFLGNGSILSLIQKYLVKHPEFGLTPMGYAYSINQTIEDKEDKTSDGYLKPSLMYLETEQKIKQFVSNHPRSCAFVLLSKDDIYHTKLEKVATTLFSSIILVSEDFFKCGIPLWVRPLEIGSFLCLKVRQNLLDPRKLVVKRCIDLILSIIIGIATFPLICFIAIWIRLESPGPIFFRQLRIGREGKPIWIVKFRTMVQNAEQVLQKTLDENEELRNEWKADQKLRYDPRITKVGKLLRRTSLDELPQIWNVLLGDMSLVGPRPIVEEEVARYGDAYALYIKVRPGITGLWQVSGRNDLTYNQRVQTDWYYISNWSVWLDIVILARTIPVVVKRKGAY

SEQ ID NO: 10758 - protein, 367 aa, Lawsonia intracellularis
MRIAIVHYWLIGMRGGEKVIESLCRLYPQADIFTHCVDKDQLSPLLKNKTIYTTFINSLPFATRYYKYYLPLMPLALEQLDLRGYDLIISSESGPAKGLIVHSSARHICYCHTPMRYLWDCYHTYLENKGIVTRTIIRPIFHYLRMWDISSAVHPDIILANSHTVAQRVQRCWGRSASVIYPPVELDLFKPTRDVGDYYLCFGQLVEYKRVDLAIKVASETGRKLIVAGDGDAYTKLKQLAGPSVIFIGKISMDERAKLLAGCRALLFPGEEDFGIVPIEAMASGRPVIAYSKGGASETVSDGITGFFFHEQTPEALLKAIEYFEKHEHTINTQQLVKHASKFSETQFHQAFSKVVDNLCASKDNIQ

SEQ ID NO: 10759 - protein, 473 aa, Lawsonia intracellularis
MKLFHVLFLVLTILFFIPFSVLAATGHYELHGTELSIIWVIPFICMLLSIALGPLIIPHFWHHNFGKISVFWGLAFLIPCAVIFGIPLTAYQLLHTIFLEYIPFIVLLLVLFTVAGGVRLKGHLIGKPIVNTGLLFIGTILASWMGTTGAAMLLIRPLIRANEHRKYVIHSVIFFIFLVANIGGSLTPLGDPPLFLGFLKGVHFFWTTTHLFPMTVILSILLLTIYFILDSILYKKEGSPLPQNISDNPGQLGIEGKVNLILLLCVVLTVLMSGVWNPDISINIYGISIALQDLSRDIILLLLTGISLKLTKKESRKLNGFSWEPIQEVAKLFIGIFISMIPAITILRAGEHGVLAPVIELVFKDGQPVNSMFFWLTGILSSFLDNAPTYLVFFNTATGDATHLMGEWAKTLCAISAGSVFMGAVTYIGNAPNFMVRSIAVTHGISMPSFFGYMLWSICILFPCFILLTWLFF

SEQ ID NO: 10760 - protein, 324 aa, Lawsonia intracellularis
MNIYTTYIEQELPYINAAIKKSIAELPSSIQPVAEHILLSKGKRLRPMLTILLSRLFGYNEDDIYPLAISVEFLHAATLLHDDVLDNALLRRNTITAHNLFGTVSTILAGDALLAKGNLLVATYGCQKCILTISQALYQTAHGEILEIYNQGEIWENKNIYLEIITGKTAWVIQAACKVGALKAGATPQQVDVAALFGYNLGIAFQIIDDALDFLPSKDTGKPEGGDIREGKFTPPLFYYLKTLSLEEKNIFIKKFQTHNFTDEEILTITRVIHEQNFDQKTRELANVYFQKALTNLELLTNVPKPEYKTILIECLNYISTRTS

SEQ ID NO: 10761 - protein, 992 aa, Lawsonia intracellularis
MLHRISVGLLSHIDDTIGQKIASSIYQTLSFPVTTANLIKVFTIEGIQKEQVNQLITQNVLHDPILQYASLSPSESNADWIIEVRFRPGVTDNEGHTARDTSALALGIENHEILAVYTSNQYHLYGTLTEQQVHRIATELLSNTLIHCFEIKSRQNWKNNPGFPAKTAKVTGIANDTVITIPLSSMNDAMLLHASKERTLALSLEEMQVIQRWFMQPEVKKERVAIGLTPDPTDVEIEMLAQTWSEHCKHKIFAAQISYKDLEQNSQEVINSLYKTYIQNTTDIIRAQLGDKDFCLSVFKDNAGVVAFNDTHDVCIKVETHNSPSALDPYGGALTGIVGVNRDPMGTGLGAELVCNTDVFCFASPFHREPLPPRLLHPRRIFEGVREGVEHGGNKSGIPTINGSIVFDDRFLGKPLVFCGTIGIIPCIINNKKGYEKKANVGDYIIMVGGRIGKDGIHGATFSSEELHEQSPVTAVQIGDPITQRKMYDFILHVRDLGLYSAITDNGAGGLSSSIGEMAQDTGGCHIDLSKALLKYDGLCPWEILLSEAQERMTIAVPKENIQKLSSIAKHMGVEISILGEFTNSGYFHATYGSKTVAYLNMEFLHHGVPQLTLNAQWEKPYYPNNRIESVGIDQSMFLHTMLGRLNICSKEYVIRQYDHEVRGGSVIKPLMGVKQDAPMDAGVLRPILNSETGLVISHGICPKFSDYDTYWMVANAIDEGIRNAVAVGADPDRMAGVDNFCWCDPIQSEKTPDGLYKLAQLVRACKALSTFCLHYGVPCISGKDSMKNDYIGGGIKISIPPTLLFSVLGIIDDINKAITSDFKKPGDHIYIVGDTACELAGSELASELHISCSSVPQVHAIQAKSNYRKIYSAIQKKYITSCHDLSDGGFAVALAEMCIGGRIGCHVELDRIPTIENLSVTELLYSETASRLLLTVSPDNIAPFEQLMGGSAKYLGRVVEHSQLIITNGNTIIIDTPVEQLAVSFKSTLNW

SEQ ID NO: 10762 - protein, 590 aa, Lawsonia intracellularis
MGNNVKEIQQIRTLIAKGKAAGFVTFEEVNKAVPIDMNTPEQFEEIIGIFDQLEIVIVDSEKEGKKITVTSPETDGDTSENCFDLVDTEDVADFSSRSTDPVRMYLREMGAVPLLDRDGEVVIAKKVETGEQDVLYALVEVPVAVEELISVGEDLKLNRIKLKDVVKTIEEDDPSEDEMSQRNRVILLLEEIRQIFKKKRKVYLKLDECCTLERRVAGIQKEILQFKEEIVTRLRDIKLEKTLIDRIIETVEDYVRQMHNCQRELSAYLLSTGKTQDEIKDLFTKLDARELSPRDAALLLNMGVDELFSYKEMILGKIEILQRLQEKCCHNVVDLEEVLWRIKRGNNAAMRAKQELIRSNLRLVVSIAKKYTNRGLQFLDLIQEGNIGLMKAVDKFEYQRGYKFSTYATWWIRQAITRAIADQARTIRIPVHMIETINKLIRTSRYLVQEFGRDPTPEEIAERMDYPLDKVKKVLKIAKEPISLETPIGDEEDSSLGDFIEDKKAVAPSEEVVNTKLSEQIASVLADLTPREEQVLRKRFGIGEKSDHTLEEVGKLFNVTRERIRQIEAKALRKLRHPVRSQVLRSFYDS

SEQ ID NO: 10763 - protein, 576 aa, Lawsonia intracellularis
MSQKNVQAIQEIKSRLNIVDIVRQYVKLHRNGSRWVAPCPFHQETKPSFSVSEEDGFFYCFGCQASGDIFTFYSQINGLSFRETLEQLAEEAGVILTRFSTFGNESQKVHTNRRQLLKIYEFTTTHFVNNLHSEIGKECREYMKKRGISDEISQYFRLGWSSSDWDTLVRALKRAGFHEQFGVEAALVGIASNGKFYDRFRGRLMFPISSLSGNIIAFGGRIIGDEDTAKYINSSDSLLYKKGDQLYGLQQARQSISSGKSILITEGYMDVITLHQYGYTNAVGVLGTALTSEQVKRISGFTSNIEILFDGDAPGRKAALRACEMFLTKGLNCKVVLFPEGEDIDSVIKNYGKEFFEKLKNDASEGLQFCIQSLKTRAPRDVIDWVKNFLKQVELPEIVSRFTSILSTGLGLAESELREYVADIKHSIKKKVTQSAAISHSLVQTTPRDKQILMFLVRYPHMLDKLKEQGAHLVLNTTWAKELWGKVEEYSEDNIMQYLNSQEKTFWVQCRTGDVPPLDNEEGEFEAIQTMLEALHMTVQSASVSAALKLGKTSSFEADLKYLRALQETLERTHGE

SEQ ID NO: 10764 - protein, 155 aa, Lawsonia intracellularis
MRAHMSLIEHIEKNYLSAYKSKDQIHLNVLRLLKTALKHLQVELKRPITDSELLNLIQRQVKQRQDAIEQFYAAGRLDLVSKESAELDILKTYLPEQLTSEELEQVVDNTLNFLGVTKMSDMGRVIQYILSQYNGKVSGKMVSEVVKVKFQAMFQ

SEQ ID NO: 10765 - protein, 120 aa, Lawsonia intracellularis
MGYHVGEDYGLPHVTTYYSTFYFTASFNAFPGRNFTTFDAGIVIISPVRGLRPLRALRDSTESVANPVKVNLPSLANTSSILINVAFNVRSAAALVILTLDAIWATRSAFVIILLLFRLI

SEQ ID NO: 10766 - protein, 271 aa, Lawsonia intracellularis
MDQTFRPKKSLGQHFLKDTAIAYRIVKLLDIHEGENIFEIGPGQGALTRHIYGYNPGQLLLVEKDSCWVDYHSSVKQQNVSKVTIHHLDALKFSWETLCGSWKVISNLPYNVGSALIWDIVSRVQSMSRAVFMVQKEVADRLCACPGTKSYGVLSVWVQSFAKVEWGFIVKPHSFYPQPKVDSAIVTLYPKPREEQPKNSKTFAWIIKQCFQHRRKQMQSILRKIGFLNYYESLERIGISPSARPESLSNQLFQQLSQEFLLQLIDFPKKT

SEQ ID NO: 10767 - protein, 386 aa, Lawsonia intracellularis
MHVIFINYGGYLGCSGVHIHFLAQTLTQQGIRCTVYLPVTIKSKNYFGQADYPIFTHNDLVAHSHTGYFKDSIIHAWTPREVSRKLTIYVVAQTHVPYFVHLEDNEITIMEQMFNKPFIQLQQEALEKPALFKDVQYCHPLYFQQFLNNATGVTCIINKLEEHVPSHVPRMTFWPACEETFFRLPEKIPESVYKELGFPLNTIFVVYPGNIHEYNKKHVSNLITAIDYVNKKGHSIKILRCGETAIPMEQLAPPHALAHIIDLGTPEAHKLHNYISLAHILVQPGCPGDFDDYRFPSKIPLFLASGRPVILPNTNIGLNMTHGKNCLLLKTGSAEEITKYLCLLIENPKIATSIGKQGKQFAYSTFSWEKSAKKLIQFYKKCLPNL

SEQ ID NO: 10768 - protein, 139 aa, Lawsonia intracellularis
MIFPLWIIGVITIAETILVVMVFLFFLRLRRSEAILAQLQSNQEHVLESIYRNAALEQELVDSFSQRQEQLIILNKGLEERIRVLQKLIDQATSISRSPQFLREVILAGKKKGQTPAQIARSTGLAVDEVELILSRMSN

SEQ ID NO: 10769 - protein, 114 aa, Lawsonia intracellularis
MPIEPIAPLLFIQQMGPAGKIIKDEATHPETSQTTFRQVVAEALSQQGSQVQGIDGISLLISLDEEPHSNNKNSDKMLKEYKEKESAKEEVKEEDSEIFQDEVDHLGNFVNRKV

SEQ ID NO: 10770 - protein, 242 aa, Lawsonia intracellularis
MLRDGVKGEDWMDTESPEEKQSNIKELQSSDTTQSKSQKVQLDIEDAPFLLDTEEEAVPLKAPGEISHSLTDTLASEEDQDSILRRKKLRKQKIAVIILSIFIIVIAISWFLFFQDVPPVEEPTLPEPTVVIVPSVEKITGPQEYKITFEPFTVAQPSGNSVKFLKATFVGVSKDEKVIKESKSKELVLRDAIYYYLSNKTHGYLIDPKNTLVIKQDLLDIVNSYLISGKMEDILLENYIVK

SEQ ID NO: 10771 - protein, 126 aa, Lawsonia intracellularis
MSYDLNMKVLVVDDFSTMRRIIKNILRQLGFNNVVEADDGTTAWEMINKEKIDFVVSDWNMPQMTGIELLRKVRASEQYSELPFLMVTAEAQQENIIEAVQAKVSNYIVKPFTAETMKQKIDKIFD

SEQ ID NO: 10772 - protein, 278 aa, Lawsonia intracellularis
KRLQKQFKVGVYRWPLMAISNFSGKSSFSDNKPWEKLESGSVTWPDFSDLDQEAIVCHYAPKIRFLASRLKAKLPKNIELSDLISAGSLGLMEALGRFRPQLGIRFETYAENRIKGAMLDELRKLDWFSRTLRQRIRQIDGASWKIENEKGRPATEEELHEVTGLAIKDIRIGLEALQNNAFLSLDVIQDTVAHHTSEKEGAPYEDTAATEIADRVSKLIDTLTDREKLVLSLYYSDELNMSEAASVMGITEGRVSQLHSQALTRLRREFLNQYGKVD

SEQ ID NO: 10773 - protein, 271 aa, Lawsonia intracellularis
MAKDFPLVFSVTSGKGGVGKTNIAVNLAYCLAALGKKVLLLDADLGLANVDIMLGMSPEKNLFHLFHEGASLEEIIVATGYGFSILPASSGVMDMLNLSTGQKLDLLESVDMLEKEIDYFIVDTGAGINDTVLYFNLAVQERIVILTPEPTSLTDAYALIKVINHHHGVDNFRVLVNMAQDTKSAKEIYVRLHMACEQFLKSISLDLIGIIPRDPNVRKAVINQKPFCLEAPESAASLAVKEVAETIQSWGVPVALDGNIKFFWKKFLFRQ

SEQ ID NO: 10774 - protein, 353 aa, Lawsonia intracellularis
MQVKTFIGPSTQSVLAQVKAELGPSAIILSSRDFQKDGQRQYEVTAGIDRPITSGGNNSNNLNGESPPQGWDEWFRDWTKVKEHLYALMQPSIQWERLSSRQRTALEYLQREEVDDAVIMELYHRLSSVPGSSPFEALSEIVPIRPWSAESWPERIQGITGPFGAGKTTSALRMALLLRKTDPSIRIGFINADCERANSRLVLKHWAELSEFGYFEASDPESMEKVIEQNEDKDYLFIDFPGISNPKETLTMQLSALGLSSMEFVVHLALPPHYATLQNQAFLSKYQSQHLSSIVWTKLDEAATYGSIVNVAMATGLPISALSYGIGLSDTLSSAYESVLWKLVFKHQLPGQV

SEQ ID NO: 10775 - protein, 696 aa, Lawsonia intracellularis
MASGPSINYSRFAKQGDIFLGAGVVVILLVMLVPLPTFLLDVMLSLNISLSILILLTAMFMTSPLEFSIFPSLLLVTTLMRLALNVASTRLILLNGDQGANAAGNVIRSFAEFVVGGSYVVGAVIFLILFILNKVVITAGTTRIAEVAARFTLDAMPGKQMAIEADLNSGLIDEEEATRRRENIRKEADFYGAMDGAGKFVQGDVTAGLFITLINLIGGILIAVVQKGMSWDSALMTFSLLSIGDGLVSTIPSIIISIAAGLIVSRAAAEAKMGEEYIAQLTYNSRVLKLTSAVLFIFALVPGLPTIPFLFFSASLFIVSRIVGKNSDTTAQDKKKAKGGSAASEPANTPEEMQDLLPLDTLELEVGYGLIPLVDEEQNGNLLSRIRSIRRQFALDMGVIIPSLHLRDNLQLKPGQYVLLIKGNQVATAEILIDHYLAMDPGNALHQIEGIETREPAFNLPAIWISEMQREETMLAGYTVVDPSTVIATHLTEVLKRHLADFLGRQEVQGLLDTLAKHSPKAVEELVPGILPLGSVQKVLQNLVRENVSIRDMLTIVEALGDYGGSVKNPDTLTEYVRERLGRSITKAYLDSDGVLPVITLGSKTEQTLQEAIRQVEGGSYLALNPSIAQQLIHNINMAIEGAVGTDGQPVLLATPIVRPHLAQLITRFLPNVPVISQGEIPPDTRLQAVGNVEID

SEQ ID NO: 10776 - protein, 357 aa, Lawsonia intracellularis
MSDDPSKTEKATPKRRQEARSEGSVPKSEEVTKALTTAAGMLGLAIYSGVMGRHFETIFYYIFTESFRFEVTAQSVYALFIYVAQEIAILLMPILLFIAVTAWISLRVQVGALWTTKVFKFKWSKFNIIKGLKGMFASQQTLVRLLRSLVQVIVIGIVPYMIIKGEFSNFLPLYYASPSGVADYMLNTGIVLVLYTLIPMTIIAVADLVYNRYSYEENLKMTKQEIKDESKQQEGDPIVKQKQRQKMMQMMTNRMMQDVPKADVVVTNPKHIAVALRYNALEAPAPLVLAIGVDRVAEKIKEIARENNIPIRENVPLARALYKAVGVGEMIPEELYKAVAAILASVWRLKGKMPGPQ

SEQ ID NO: 10777 - protein, 262 aa, Lawsonia intracellularis
MNLFNFDPSMFLSFLLTFLRISVVLFMLPFFSIDGFPNMLKASIALILTIVLWGRLSLSGTQMPAHPFDLVLLIISEVFLGIVLGLAVNFFFAGIQAGGEILATQMGFTMITLADPLTGNTTGFIAHFLYMVATLVFLALNGHLFLIKAFTYTFKMVPAGGLVVREILLSELLNMAGMIFVFALHVAAPVMSALFLVEISLGLMARAAPQIHIMEVGFPVKIGVGFFFIGLLFTILSKETYRFIAGLEGLFFNLLTVMGSGK

SEQ ID NO: 10778 - protein, 196 aa, Lawsonia intracellularis
MNSAALIETITQLISPLITAQGLKLWGIELINIPQPIIKIFVDTIETNRLHENNIINSKSEQITIEQCASLSRLIGLTLEVEELFPNKWTLEVSSPGLERSFFTIQQLSNYINHDIDVTLKEQHPLWPNRKKFYGTLISITDNTFMLNLSLAHRKSDEPENVSINWQQVRKATLVHHFFQPNKKLGSTKGLNGGTT

SEQ ID NO: 10779 - protein, 440 aa, Lawsonia intracellularis
MNLELKKALDQISKDKGLDRDMLVDTLEDAVRTSVIRRYGDNLDVEVSYNDDTGEIEVYQFKIVVEEVTDPITQLSITEAKTHDPSAQLDDEMGFRLKVEDLGRIAAQSAKQVIIQRMRDAEQEIIYEEYKDRIGEIVSGIVQRRDKGGWIINLGRTEALLPKDEQIPKEHYKRGDRVQGLIIDVRKEGRGPQVIISRAHRDYMAALFRREVPEVDDGTVQIMGVARDPGSRAKVTVLSRERDVDPVGACVGVRGSRIQNIVQELHGERIDIVIWSPEITTYARNALAPAIISRITVDETENLLEVTVPDDQLTSAIGRKGQNVKLAAKLLGWKIDIFTETRYNESNAVGRGLEQVASVAEISIETLLHSGLNTLEQINETSDEELIEKLGISESQVNDLRAAVNFLSTTATVDSNKKKKEVEAEQAKDNENNPADTADY

SEQ ID NO: 10780 - protein, 961 aa, Lawsonia intracellularis
MINDKIKVKDLAIELGVSTKDLLRVLRELEISAKSTISNISIEDLPKIRAQFNTPNTNKEEERRQIQPGVILRRKRQQPSTNQTDIKLNPVDTNVSESTIQTENLILENKNTLSPHIEETTEKIPATTNEILYNSQIAKIVQYPTPSVPNKTLTTTPHQTKKNHSEKDVLESHDSSNKNIKQSSSQNTEKTNRKPAASAIPEGSSAPSLLPPVSEQIRRLHDEETENSSSEEKNVDIQQKEIPSTQVRVISKPNITQSHSWDANNTRSSSGQRTETEKQSNTAPHTDSREHTGHNKRPVSYQGQNRNNFIATPDTIPNVEHDGQNKKKRHTSRRSTEFNHKFQYNNEDDDISRQNRGRKRHKQKTTSQVTTQPIKLTKRKIRVEEAIRVADMAHQMGLKANEIIKVLFNLGVMATINMSLDIDTATLVAAEFGYEVEKIGFTEEDYLVATAPEQSESLKRRPPVVTIMGHVDHGKTSLLDAIRKTNVTGGEAGGITQHIGAYHVTTKSGEIVFLDTPGHEAFTTMRARGAQVTDIVVLVVAADDGVMEQTREAVNHARAANVPIMVAVNKMDKPEANPDRVLRELSDIGLVPEDWGGDTIVTKVSAKSLDGIDELLELLALQTDILELKANPDKPARGHIVEAKLDKGRGPIATVLIQEGTLHQGDTFVCGVFSGRVRAMFNDQGKKVKDAGPSMPIEVQGFEGVPEAGEAFICLPDEKLARRIAESRAIKQREKELAKESRVTLETFLSKTSNEKEAQVLNLVVKSDVQGSLEAILEALRKLSTAKVRINIIHGGSGAITESDILLASASDAIVIGFNVRPTAKVKEVAEQENVDIRFYDIIYKLVEEIKSAMAGLLAPISREVYLGQADVREIFNVPKIGTIAGSHVSDGKVLRNAGVRLLREGVVVYTGGIASLRRFKEDVREVQKGYECGISLENFNDIKLGDVIESFETVEEAASL

SEQ ID NO: 10781 - protein, 332 aa, Lawsonia intracellularis
MANYPPSAEEIASLIQRYDRIVVTSHINPDGDAIGACGVVSYILKALGKRFIIYNATGIPYHLEWVPLPTKVITKLMDIPFKPELFIILDCGDIWRLGRELSSCLLEYQSINIDHHIGNPNFGTLANWVEPKAAATGQLVAAIAEVIGIPLTGELAQCLYLSIVTDTGSFAYSNTSPGVLHLAAKLIELGLNPSPIREQLDNQWPLAKFHLWGKLMQKIQLEYDGQIAISAVTLKTITDFGATKEDLEGFTEQIRKIKGVRVAALVREDPGESCKVSLRSSGTDNVQAVAIQFGGGGHFNAAGATIHEPIETAVKQILEAIQKITFSTTDVD

SEQ ID NO: 10782 - protein, 216 aa, Lawsonia intracellularis
MFGVDPLIIILGLGALGLAPFVIMMVTSYVKIVVVTSLIRNALGVQQVPPAIVMNGLAIILSIFIMAPVYMKMEDLYLKTALPSSPAALEVIKALYDATPPLREFLIRNADESTIRGLMVTAKRIWPKDQHETISRNNLLIIIPAFTITELTKSFQIGFLLYLPFVAIDLVVSNILLAMGMMMVSPMTISLPFKLLLFVTLDGWLKISQGLMLSYR

SEQ ID NO: 10783 - protein, 360 aa, Lawsonia intracellularis
MSNLGSQGDIQLFTPPLLSKLAMRLLNEVTTLTPPWIIPLGETSCIVHLGQPSLYVAEKVFLRFQCENDLIQIALEDLSILWLHPALSSVRYDSPLSDVVILPILEALFAPLKHKLQNILHVPVIFLGFFYEPLVDYQFGCVITLIFDSTKLEENKSYTGLMRSNIPLRIYIPEGNSAKNFLIYLQTLPKNNVMPLALPLEMNIRVGYSLLTIKELMQLTPGDVLFPYDYPILRNRLSLVFLDKEIFCSVEGRHIKVLGWNGTTLFSQKSPVIWSSESTIRNKSIEHPLEVPISFEIGKYNTTLSELEHFIEGHTFTLELDIHSPVILSFEDKTIGTGVLMNFNGVIGIRILEFSTTIDE

SEQ ID NO: 10784 - protein, 165 aa, Lawsonia intracellularis
MSKYPLAPLLSVREHKEELAQQAVLRAENALVEARKDLQKAEEDCKNYEEWCQQEINRYYSEIIGSLVLFKELELLKVKTGILLDNVKEKYKLVDKAKDYVEACIEAKERAIKNLTELKKQTAKLAEHKKLWEAEEKILAQQREEVELEDFKMPEREEEQEDIDE

SEQ ID NO: 10785 - protein, 438 aa, Lawsonia intracellularis
MALEYIASLLEEAVQNTSPVEVRGRVEQVIGTIIRAVVPGVKIGELCELRNPWDNWTLQAEVVGFVKHVALLTPLGDLQGISPSTEVIPTGMVHAIPVGRELLGRVLNGLGEPIDGKAPLRLRTYYPVYADPPNPMLRRIIEKPISLGLRVLDGILTCGEGQRMGIFAAAGGGKSTLLSSIIKGTTADVCILALIGERGREVREFIEHDLGAEGLKRSVLVVSTSDRSSMERLKSAYTATAIAEYFRDQGKKVLLLMDSVTRFGRALREIGLASGEPPTRRGFPPSVFSSLPKLMERAGNSDKGSITALYTVLVEGDDMTEPIADETRSILDGHIILSRKLAAANHYPAVDVLASVSRVMNAIVTKEHKENAGKLRKYLAKYAEVELLVQIGEYKAGNDPAADDAIKHNKGINAFLQQGLDEKSTFEQTLQALKKAVA

SEQ ID NO: 10786 - protein, 204 aa, Lawsonia intracellularis
MGTYFRLTSSLPELTERIPLLKADFFSSLISSSELSEAVTKRINELKLHAEEVYKQKGKDGYEDGKNEGLRENKEHVLETVLLSVEFIEGIEDDLVQIVMNTVKKVLNEMDPAERIIRIAQRALKNVKSQKELVIRVSTADEKAITKKFSDTLKSTKGGFLNIVVDARLEPGSCLVETEYGVVDASLDVQLKALESAFHSKIKY

SEQ ID NO: 10787 - protein, 234 aa, Lawsonia intracellularis
MDKVFFLEIIINKPQLFEAIIEFNCNLLYNVMIQTAEEMASFTDATPGFDNSFIQKLALRGIALKKERLMETEYCFWDFMEETRRIALLEPETVRRLQLVFGAAINADEIAKVLRRDEVLQLQQILGQDLYQYSLLRGRYQVGAVRRFFLAQSHSIPLTTRIHWDGRMALEICASSWPSVLQSIFFSQLNFVFSTEDSAVLSQDYPSPVIKGVWDGLKKILLREVAPQWAPIFD

SEQ ID NO: 10788 - protein, 290 aa, Lawsonia intracellularis
MLLTDRYIVKATDSNVYPLKKWDNILLLFIIFFSIIFISGCKLEVYKGLTEDQVNEMVATLIYRGIDVEKSPGGKEGFSLLVAEEQLISALEILKKNALPRENYVSLGEVFSGQGMISSQSEERARMAYAISQELANTFSRIDGVLTTRVHVVPGYTDQAVDSKILPSMGIFIRHTPDSPVVNMLPSIREVAAKSLPDLEYDRTSVMLLPVQEPLTIPSMGSSTFLGISLFPERGSPYFLIGMGIIFLAIIFGIFFCIGLVLFQKDIPIAKKIDNDGSISGEQTIKPEEQ

SEQ ID NO: 10789 - protein, 125 aa, Lawsonia intracellularis
MLSEYQVKRLLDTANTACHYGLVGVARKIYDGVLALKPGFPPALIGQALSHIVIDEFSEAEEILTKYLEKVPDDPDAQVFLGITYMFTGRGDQSSLLFEKVAATDGAASVFAVDLLEVMKIQLQS

SEQ ID NO: 10790 - protein, 98 aa, Lawsonia intracellularis
MAFTKKDLEAQERQYLELKQELERLNKEYDERLEALGVTEEKLEEFVKQLPPEVIRTLEEEKQKIQEKFSDIPVTKKKEEDISTKRKRIVSRRGVVKL

SEQ ID NO: 10791 - protein, 120 aa, Lawsonia intracellularis
MITHEIEEFGRRMGMSDLELSQDGIIAFEVEDLGSLHIEQDEENEELFIYLATPVPPYNNDIPKKVLELCSYKHAHPFILHGGIHNDNVIFLSRISYRDVKASTIENTTQFLISITQKVL

SEQ ID NO: 10792 - protein, 113 aa, Lawsonia intracellularis
MLLTSEQRQTLYILGYLYIRMGLNDSAERLFKTILSLFPEDKWSHRSLAVIAMRKGDSISCLAHIYKAVAGEHSIVKHAPLLLLQAQALWNLGRYSESRTSIQNYIKIRGSRT

SEQ ID NO: 10793 - protein, 700 aa, Lawsonia intracellularis
MSLFAKAQSTVGVITRNNDITMVLLLVTVIALMIIPLPTPLVDTLIGINMGLSFLIVMMCMYVKTVLDFSVFPTMLLFTTLFRVGLNITTTRLILLQADAGEIIFIFGEFALGGNFVVGAVVFVILTIVQFLVIAKGAERVAEVGARFTLDAMPGKQMSIDADMRAGVIDMEEAQKRRARINQESQMYGAMDGAMKFVKGDSIAGMIIAVVNIVGGTIIGVTQHGMAASDALHVYGILTIGDGLVSQIPSLLISIAAGILITRTGDSAENVGSQIGEQIFNQPKALLMAGGVVFLIALVPGFPKIQLFAISATLAGIGYTLKLIMTNPAPKNAKQSIAKTLEPTTSPSKKSSTEQKESKEEFSPTVPIILDISQQMSEELDYDSLNDELITLRRVLYFDLGVPFPGINLRISSKLHDLTYSLMINEIPITKGTLEKGMVLARDTKENLAMLGVEPEEKEKFLPDVESLWVPDSKKALLERAGITCMTHSRILAYHLSLVLSRHASNFLGMQETKYLLDKMEERAPDLVRETTRLLPVQRIAEIFQRLVQEQISIRDLRSILEALIEWSPKEKDTVMLTEYVRSALKRQISYMYSKGQNMLPAVLLDPNVEETIRKSVRQTSAGAFLALDPETTQIFMASLKEFASETNLTYTQKPVLITSMDIRRYVRRLIEGDYYNLPVVSYQELTPEISVQPVGRIRF

SEQ ID NO: 10794 - protein, 86 aa, Lawsonia intracellularis
METTTMTYTAKALYLVLVLSMPPILVASLVGLFVSLIQAITQLQEQTLAFGIKLLAVVLTLFFMGGWLTGELYRYAEEIFNRFHIM

SEQ ID NO: 10795 - protein, 271 aa, Lawsonia intracellularis
MNYDQTIGALGVYDHFIAFLIGTPRLFMIIQVVPFMGNNIVTGQLRVVVVFSFYLLLSPALVAQLPHIPEVDPSLLPRILAIVIKEGFIGFFLGYLGSMVFWMIESVGLFIDNQRGAAMAAQTDPLSGSQTSPLGSFLFQCLVYIFFTSGAFITFLTLIYKTYEFWPPHEFIPMSWKMRLPELIIKQVDWLMAYTMLLAGPIAVACLLTDVSLGLVNRFASQLNVYVLAMPIKSAVAAFLLIFYFKLLLEKATFLFKPFETVLFQIKSLIQ

SEQ ID NO: 10796 - protein, 360 aa, Lawsonia intracellularis
MSGDSGDKTEPPTPKKLREAREQGDVAKSQDVAAAMTMFGASLYFIGMWQDVFSNLLNLIELPTKFIHLPFEEALPATISGIASIAFSILIPIIATLMFLAVAADLMQIGVLFSVKSAIPKLDNLNPKKWFSKVFSIKNLGEFVKNILKVSVLTITVWIILSNYIKELFAIASGNIWSLWYILGSVLRDLTLSVSMVFSVIACIDFMFQKWQYNKRQMMSKQEIKQEYKDMEGDPLIKGKRKQLHQEMAMQNPVNKVRKAKVVVVNPIHYAIAIDYEKGRTLLPVILAKGEGLLAQRMVAVAQEEGIPVMQNIPLAHSLFMDGIEDSYIPRNLIAPVAEVLRWVNSLNKNMIHKPISNDT

SEQ ID NO: 10797 - protein, 1382 aa, Lawsonia intracellularis
MRYFNFHNLARQLIISPKFFLIICSFIYLTYILLLPLVHANNDTNNNLNTDLTFSPEETSTGIITDRVTPLLDWILDQSGQLTINQVLSPEVQRTFSSFLFTDLPKQEGTFWFRFVIDSTNRLSSSDFILDLSKRTPTQFPEPTQVWVVSMGSGKATLINPIKDNSYPIKYSGAEVLEVYIKLPGAPGVGFTPVLWTKKSFSTFYASMHVAILFLLAITIAICLIRAFTEKQEWRIWAALYSGSILISTLWGLPPTPKGILTIWDIPGLLAPGIALFILPHIGRRLMNTRQVSPHIDIQLLLLTLPGLVLSILPLIPGYLWTLPYLSVWPLITILFLPTCLYARFCDLKQSKTFFTICAFPSIGILPLAISINSMPQYIPIGLINLFPIITLTLSAMLVALVPNPKPSSGAIRREHPSSNIKIPSIPNKQNKIQMKKEEEQRTTTTNLNIESLEQQLRAPLERIRKELSILNTSLQSTPLQQHIESIENTAEGLSHIINDIPELFISKTHTDKEIFDLNQIVLGIHDAVNNDAESKNLAFSWFIAPHLYQKYEGNPTQLTQVLYMLVESSIQATEKGLVQLRIQRVPNSINPGELLITVSDSGKGSPPITRSPLALIHAWELATSTGGSVTMKSEPTGTTISFSISLTAKQTTTSLSHQHDESITTTEQPTTQLSQIIIVDIVPSNRQLLTYYLDELPYNIFEAQDVTTVYNLYKQSPGAVIIFGPELSETIAIETIGAIRVFEGEHNFLPAPILAICKTEAQKERLLRIGCTHVIIEPLTRKTFRQTILQLSPISSHTQAIPSPLLESTSKKIKQTAPTSSVNSKLIDTVNDSQIPCMETPIQDIPISPHASLYSEDNTSEYTHEKKGIALLKTPDQIKTKKLSIIKGEPTPISSSTHQQRNDTSLTNNVSYKVEQYPLMSSSEWVGEPTPITKQKTSTNKTSARLSQHSSEWVGEPIPIIKRKKPPITPPKNDPLHNTVEWVGEPMPITIAQQKSLTIEQQPIVNLTIEDEQLSSEKRKIVEENYTTTIEKTLSAEPKPHEQLATITKEKIEHIEPIVTTNDIHKNNLLENGTSFNEKSVILQNSIEIPEDLSIYSPSLHIQNSPEKSFLSSQSEPDNNSQCINNSSKEIDTIQEVPITSSDSAIINQKDNKHHDNLLTATTTRQKKHNNSRQKNSRHQKSSLSLLDMITIPTEENQETNHTQKALNTDSYLSMVGHPEIPEEHIITLTETVDTYKKDTLSVKKDIPDLFSVHHPTEVIEDFTYPKEQSEQLSMMQLFSSTLNIVEENDLGTHSKELFQELDITLGLLQQAIQTKQSENLVSFSQVILSLSEQLKLKHLKTLSYSLLDAIQTSKEDIIEQLIKDIKAEVQHNQGDTTDLL

SEQ ID NO: 10798 - protein, 421 aa, Lawsonia intracellularis
MQNIRSSYTDSINFFGKTSPEELIKIYGSPLYVYNESIIRQRCKEIKSLSSYPNFFVSYSAKANTNPTLLSIIKDEGCLVDAMSPGEVYLHKKVGFKSDEILYVCNNISAEEIQYAIDNKILLSIDSLSQLETYGKLNPGGKIMVRINPGIGTGHHKKVITAGKETKFGINTEQFSDVKKIVDTYQLMLVGINQHIGSLFLDPQNYLDSIAFLLQFIDNNPWIFEQLEIIDFGGGFGIPYKKYEEQPRLDLKKMSEQFNTKIMDWVASTGYKGRFYIEPGRYIIAESGILLGSVHVVKYNGPIRYIGTDVGFNVLMRPVLYDAYHEIEVYRKNGTPDLQLIPQTVVGNICESGDIIANKRPLPLIQEGDIIGILDVGAYGFVMSSNYNQRPRPAEVLIQQNGEPKLIRKRETIEDMNIQLH

SEQ ID NO: 10799 - protein, 392 aa, Lawsonia intracellularis
MPSFSFVLRCCLLFLMVLTSQTLSVSQPLREEAEGNLPQHIEATLTNLIEATSSTKQYPSVSQLDTILQFVTSTNEQAHKILPATRDYGKGIFYKTTINIPLSTLIKYFLNPEIPGEALYPTSIRRNVWQEGSEILQNSNIFLAAPLPPQKPIFSRGTEYEEITPDISSGCYYNYILKRLFILYKFKSETAFITVSFMPKESSVGLRGGVIGKDTEWDYVYGPDIGTNLPMLTWAKTYLYGSATINIFTQKPNSPTTDIYIFKWTSAGWSGMNVVTHKHIRNGVIRFISGLKQIMESPYLPSEQEIIKKHSELNTMSLNELQSALKPFASKLAAKSLKDSTLSKDNFQKILKNDVYPTTLTKENAVAELLKRYMKQKINQTMEGKTTITSKK

SEQ ID NO: 10800 - protein, 251 aa, Lawsonia intracellularis
MDPQHRVWIKTTLALTGAFYNIFPGRTISTQENLSIGFQLKKTFKPFHWTILLLDEHYMSSPRIAAAIMPAQLAGVKNIIAVWTSKNNRLTAEKISPALLTTLELSGVNIALTLTHTETELLIHQLMKIGIGNLLYFLKEEDILHISTIPVLPFWKEYTSHRLVIEKDAGINTEILQWAHPHSIIEQIATEPYSEDIPDALYCASSSSKNYTSYRIPRIFHNGLEAYWIHPTLSPASFLHTTWDLSLLEQD

SEQ ID NO: 10801 - protein, 395 aa, Lawsonia intracellularis
MKPLHNIILIMSIALMGVMGVSIILPVLPLLAHIFELTPTEVGLIITCFSLPSALFTPVAGIIADLYGRKKILLLGLALFALGGVGCALSTSFKGLLFCRAIQGLGAAPLGILYSTIIGDLYNEEERPKMMGIAGATISIGTAIYPALGGFVGEIHWTLPFWFSLLSLPVAIIALIYPYPYKGTKTSIKDYTKISGKLIFHSHSVGLLSITFLCFSILYGPILTYFPLIANLLYQASPIQIGITFSIACLGTAIIAINLAQLSRTYSHKKLLIIAAGCYFISQGLVIILPLQSQNIWLLTLPIFVLGIAQGISFPLVNSHITSLAPTSNRAIVMAINSTFMRLSQSISPIVFGIGWSFFGWPGPFIFGLFTSIILALLIMKVFSRCNPISPIFDN

SEQ ID NO: 10802 - protein, 266 aa, Lawsonia intracellularis
MMSWLTIGVILGLVQGITEFLPVSSTGHLIIVAKFLHFTGSKASVFEVAVQLGSIMAVVVIYWNRFIGLIRPEKNKKFTGLYGIWLLFLTTLPPGIIGFLFHSYIKTLFTIPSVIAALTTGSIFMLISEQLCRNISQRIVTLDELTPKTALGIGFFECLALWPGFSRSAATIMGGMLLGAKRHLAAEYSFIAAVPVMFAATGYDLLKNWDLFTANDLPLFITGMICAFLAAWITIKVFILLISKISLRPFAYYRLLLAFIVYLCIK

SEQ ID NO: 10803 - protein, 423 aa, Lawsonia intracellularis
MSSIRKSLLQIMFLGASMRRWNDKLRPIELYEVDKQGHKMIIAWMLTLLNSRHASESEKIALQQTVIERGLFDYLFGLIVTDITPQIFHRICEHHIHKRQLTDWVLNKLKPIVEPLSRDFWDRMVKYHYQTDRTELADKIIKAARLYASGWEFALIQPFNTFDEETKNISHFFISELFALKELTGVQDLIQGEAFFIENPTALGHFARLSGQLRFQIRWSDTPRVPETSVLGHMFLVAGYVYFCSLVIGCCPARCVNNFFAGLFHDLPELLTRDIITPVKRSVDQFSILLKEYELQELERRIFVPLRKSGYIDLVHRLQYYLGLLGEDVTSEFQETIQDSSGVKRIKNFEELQLFNNKDEFDPKDGQLLKACDSLAAFLEAHTSIYKGISSPVLHAAVARIHADFHNLTFGTLSFGTLLADFD

SEQ ID NO: 10804 - protein, 144 aa, Lawsonia intracellularis
MKTFSPKPEHISHQWFLVDAHNKILGRLAAQIAHRLRGKHKPEFAPHIDNGDYIVVVNCEQIKVTGNKQEQKKYYRHSGYVGGLKETTLKTLLEKKPAEVLIHAVRGMLPKNRLGRAMLKKLKVYAGPEHQHIAQQPIPLSLPY

SEQ ID NO: 10805 - protein, 130 aa, Lawsonia intracellularis
MSTEFNYATGRRKTAVARTRLYPGNGTIKINGRPLENYFPRKSLQMIIRQPLVHTKLLDKYDIKINVSGGGVSGQAEAVRHGISRALLEVNPELRSLLKPVGFLTRDARQKERKKYGLRAARAKYQYSKR

SEQ ID NO: 10806 - protein, 551 aa, Lawsonia intracellularis
MKDEFLTITPLGGLEEIGLNCQLWETSKGVVLIDCGIMFPNEQHLGIDVIIPPIDPILHVKNRLLGVVLTHGHEDHIGAIPWLVCFIPGLKIYGSPFTLALVEHKLKERNLLSSAQLIAVTPKTKLNLGNLYFQFISVSHSIPQSYALAVTTPVGKIIHSGDFKIDPTPSDGIGTDLQSIKEFAGNDGIRLFLSDSTNADEQGHNLSEQYIKKNFYEIFSEAKGRIIVTLFASNIERIQTVCDLVKVFNKKLVVTGRSLINNIEKAKELGFLNIPYKFFTDQNVPDLSPEQTVIITTGSQGEPLSALVRIISGEHRYLSIHEGDTVIMSSRVLPNSTLAVNRLINRIYRLGATVCLNGQKAIHVSGHARQDELKILLTVVNPQYFVPIHGEYRQLFRHKELAMQHGIPSENIFILDDGEPLTLLPTKVRKEKKIPLKSILIDGKGIGDVDSSVLRDRQLLGGDGVVVVSLTRDKGTGSVMQGPSILSRGLIFEKKLNCLIEEAKQVVIEILQSDLTLTTQKLEKKICTSLHSFFRNVIGREPIIIPIITEN

SEQ ID NO: 10807 - protein, 342 aa, Lawsonia intracellularis
MSKNVHIDLKIGISFAISTGTFLILGLYILLSIQPIIDQFKITILETSDAISITTRLLITMKEASINFRSYTVRADQSFYDNFTKNIHLFNTALEHAQNLNDDSISLKILNKNLPQVIALKKEYKEVGQKVYDLTEMFKQNTPKLAFLLSAFINDIEEFLKTLEELVRNTGGKDAEAFKLIVDLNQLIETSLLARGDFWRGVSNANSNAFETCLKILKGSISHMEAIKEANSVKEFTAPFESLIFSMKNLENIFVTIINNYELAQENIQNQDAIVQSILTLLNEILEENMDKIGIESKSAVENLKLIRNIVLMLVAIGVIFTNTVGFIVAKKIGEKTYTPSK

SEQ ID NO: 10808 - protein, 119 aa, Lawsonia intracellularis
MAYLPYEYFCYFVYDIELSYEEIMSKEERLTFFVQQILNSFDAIHLDFTPVGDGLQVQCSFEDMNDRKYNELCEALSNYTCDGINGKFLLISRDLNQLQGVVASDKTFQKYTFTIPPWN

SEQ ID NO: 10809 - protein, 163 aa, Lawsonia intracellularis
MGINELKRLCIISYARLGIAGLSPIMPGSCGSLIAAILAPWLFIPFSTFTRILILIFIFWTGSLVGTIIEQLLQKKDPKEVVIDELLGLWIVLLPFKNPGWIFIGLAFILFRIFDIIKIWPVNASENWLPGGYGIMIDDVFAGLQALLIISILYWTGYLNQWL

SEQ ID NO: 10810 - protein, 158 aa, Lawsonia intracellularis
MALLRYYLTIGIIFITLLSSATATQPKTESPESILNKPEKSTKRNTTISIEFEGTDSIGSKLSTRIKELMNASNLFTLTEKDSPKIRILLATMSEFSQRPSIGSVYSVVWLFSQSETTLKHFLAKKIGVLTADEVDQVAAMIVEQTDTLAVRYGYLLP

SEQ ID NO: 10811 - protein, 690 aa, Lawsonia intracellularis
MSLTAGMWTGVSGLLSHGEKMNVIGNNIANVNTVGFKGQRMDFADFIYQDGFSTAGITQIGRGVGIGAVMGNFGQGSFETTTEATDLAIGGRGFFKVKPQGSETSYYTRAGNFRFNNDGYLVDPHGYALQGWKIDNTEGPQRISGGVNPGTNTSQIMGTGEPTDIRLDTWTVAPLQTTNVSFNVNLSSDKSGDKSQNVNSPFTSLFNIWNGKQPSEPNNPPMPESAYSYQTSIKVYDEAGGTHTLTVYFDQVSPKDYKGGGSGESVWEYVVTMDPSEDNRQVSVGGNIVDIKDTKAAGMLMSGTLSFDSSGKLANQSAYSLNGSRKPAVDPATGALINGNGFTIDRDGNAIPILNIDNPAENFYPAEVSNNGFPMIVANFTGVPGKNTAGSVGDATTFFTEIDFGLKATDLDNTWKNANEPLSSLSYKKTHNPMDVAGGWTVGGYKTPAPSVTELGMAQILENPAGVMPQYYFGNPNYDNTVPQSPPYVYKNEASYQAAYKTALTAAGGTAADIKKEHWPHNAASGILEANDPPNVKDLANMNGTPNRLSNAFTNYAGGSSTKSASQNGYGFGDLMNYSVNAEGVLFGVYSNGVQLPLYQVALYDFNSKQGLRREGGNLFSQTRESGDPSSGAANTSGFGSINANTLEGSNVDISTEFVSMIATQRGFQSNSKIVTTIDQMLETVVNMKR

SEQ ID NO: 10812 - protein, 279 aa, Lawsonia intracellularis
MPTNGASGVSSATGIFSQQAGKSELGKEDFLKLLVTQFKYQDPLNPMEDKEFIAQLAQFSALEQQMSTNEKMESLLNLQTQQQMISAASFIGKEVAARGYGVSVKGDTISNIQYAINEEMVKGYVNIFDASNQLITTVQLDSKAPGIHDFDWDGLLPNGSKVSDGVYTVNIAGQNSAGAPVLVDTSVSGKVEAVTMYQGDQLLRLSDGRLVALSNVREVVQPKTVEPGDDTDSGDSEDGESGGGDNSDPGETNGTEGSEGSGMQDLYQLLPTIKEKLSR

SEQ ID NO: 10813 - protein, 608 aa, Lawsonia intracellularis
MQIFPISSDMLYKEASSLSRGNGRDSFAFNQLFTKFFKNTPAEITPNLFYDSVDKNTSFFSTEAPYDNSAELRVDVSTLYPSSSSIDDIRFTDSELQKVIDSLAAQGAATETVQNLLGSPNGTAIGDVIQAVAYEAPVRLSESDMINIRSLANKLDSSGQLGERVLSDFRQGRSVQAWDRLSKALSSYDPNVKLSISHKEIVSLGKALGANSATLDALSKSFKGSKELSLTPDQLRNLLVPLQQQMTNKIDAQSKLASQLEGALMPVIKEAKKRMDEEISAGTIESRRSEQSKILIQDTVTKNGIANIQQQDVASETLNKIQGAEQTQDTVTKNGIANTQQQDVASETLNKIQGARQNTDSAKFAGQFQPQTGDKENLFQGKNSGDGLFEKNNGQDSKGLLSDNKGKGVTTTSSNPWESLAQRLGVNQSVGTVIPLQQPIQQNAQLTAIDRLAARMFSQIEQGAFSALRNGTSKLELTLNPLELGTVNVLLTTKNGEVSALLRPERAETTAALLQQMDSLRAELEQQGLKVAKVEVQTQLKDEQNMHWQGMDQHNSSQEQSERVRDLERLRMLGRVGQEDNGVEISLAHNMHNNSMTAGNTSRVDIIA

SEQ ID NO: 10814 - protein, 469 aa, Lawsonia intracellularis
MTQSPTLIIQLQRMGDLILSFHLCKRLLMLEPNHPLWVLAEPHFFKELITVAPQVVFFDHSMIPNLKLRNYRRVINLSHRDIAAQLTGVLTTEEKIGIFNQEDFLYIAGDWRLYRSSIVNNNRHNLFHWSDLEALGLIPEQSFKEVIWPPLRNIGSSGHIGLFVGASEAGKRPNAQFWGLLARYLIRHNLYPIFLGGPNDRSLAQECIDIAQLNSSNNFAGKFNLSELVLFSQKLDLFVTPDTGPMHLAAWTGTPVLNLSMGNVNPWETAPASPGHIVVRPAMSCVGCWNCEGRDFSCRSLFTPGKIGRLIVHLIENSSLEKSIFSGLHIYKTSRDERGLFTLVPLLPNIEHQRHLLGLFWKEWFIAMLGGMSDKLIPVSKLFFENAPHMCNPMQKTLLSLSKNVAKVLKKGSDIVPSKYWFSVMPALRPATGYIDLLLQNNKFSNKAWKKTGTLLSSLIETFSFASQC

SEQ ID NO: 10815 - protein, 294 aa, Lawsonia intracellularis
MSLVINNNMMAANAARNLNESYSRLSQSTRRLSSGLRVGTAADDSAGLAIRELMRADIKTFQQGARNANDAISLVQVADGALGVIDEKLIRMKELAEQAATGTYNSTQRLIIESEYQAMASEITRISVATEFNGIKLLDGSLSGPHKGTNLQQTGALRVHFGPGNSSAEDYYEISIHSATASALGLGNGTTGPGATISTQAAAQAALDAINDAIVSKDNIRASLGTLQNRLEATITNLNTQAENLQAAESRISDIDVSTEMTEFVRNQILTQSGVAMLSQANSLPKMASQLISG

SEQ ID NO: 10816 - protein, 233 aa, Lawsonia intracellularis
MDLKELQEDLGYYFKDEQLLITALTHSSWVNENDVTAEHNERLEFLGDAVLEICISEELFKRHPEAREGELTRMRSNLVNTKMLVLLARELKLNQYLLLARGEENQGGRQRNTLLADTMEAVFGAVFVDGDLFYARKVISKSYDNFWPKKSAALVKDFKTRLQEETQRHIKGLPKYILEGMHGPEHEKIFEVCVELPDGQVFRASGTGLKRAEQEAARIALESLMHCQSVNDK

SEQ ID NO: 10817 - protein, 111 aa, Lawsonia intracellularis
MSYTIRMVKLFTGELVLGKFDPEKNILKDVALLQVIPTQQGAQMMMLPYGYPFEQEFSGTIEAKFFIYEYKKVPEDLETKYLEACTNLTLSTAGVTLTGATPSGNPTGLIK

SEQ ID NO: 10818 - protein, 173 aa, Lawsonia intracellularis
MSEQLVAVGVLSRPHGIKGEIRLIRYTDSIDVFLGEVFLQKSNSLPKKAEIISSRIHQGVALVCFKGFSDRSAVEVLRGQTLLVSRSFLPEIESNESYLCDLLGFSVVLDNTDEVIGKLEYVSFPGGQELWSIITPEGKEVLLPAIPEFVLEVDTNAQLIRINPPKGLLELYK

SEQ ID NO: 10819 - protein, 77 aa, Lawsonia intracellularis
MLKSFVEFVAKSLVDNPEEVQVCEVEGEQTSVLELRVAKEDLGKVIGRQGRTARAIRTLLGAASSKAQKRTMLEILE

SEQ ID NO: 10820 - protein, 504 aa, Lawsonia intracellularis
MFESLSERLSSVLHAIGKRGQLTEDNIRDGLREVRLALLEADVNFNVVKKFIEHVKEKVVGQAIEKHLTPAQQFIKVFHEELVNLLGGKSTKLDVTHFPLSVIMLVGLQGSGKTTSTGKLASLLQSQGLRPYLVPVDIYRPAAIEQLQTLATQLNIPCFASNAAMKPLDIINAALHEAKEKEYTVVLLDTAGRLHIDEPLMQELTDIKLVAHPQEILFVADAMTGQDVVTVAEEFNKKLSLTGAILTKMDGDARGGAALSICSSTGVPVKYVGTGEKLSDFEVFHPDRIAGRILGMGDMLTLIEKAQSTFEDDELKAITEKIQKATFNFEDFFSQIRRMKQLGSLSSLMKLIPGFGSAVSKFRVAIPEDEFSYTEAIINSMTIKERRNPDLLNTSRRQRIARGAGVTLNKVNQTIQKFDQMKQMMQRVVSDNSLMKNAESGEGGFGLGSFFGEGGIGFSALPGIPGLFGRPVLRSTSIGGVNGSGKSATKKKKEKKKHKNKKRK

SEQ ID NO: 10821 - protein, 470 aa, Lawsonia intracellularis
VNNNKKDMNYLQHQLVLDITSIVSDGRGLGRFENKVVFVPHTVPGQKVLVNITSVHSKFLEGEVKQIIKPSKYEREPICIHAIQCGGCTWQHIQYKHQIIWKKQIIQDALERIGKVNNPVILDVIPSPCEWRYRNKMVFAFAPSPCLSTVLLGLKRVDSHEVIPVTDCLLQSKNTMKIVEIVRHWVRHEQTSLEKKILTLKYFRFLIIRETITGDILVELIVNKKNTLIENKFDEQALGKRLAQCLKGVEAIKGIILSRRTQVSDIAYSEYIIWHEGERFLEEQVGDIVLSRGNDNFFQINTKATEILYSKILSMAQLTGKELVWDLYTGVGSIALFLAPFSLKVIGVESIAASINLANKNRLSLGYTNCSFIQDDAFSFIRSQIQKGITPDIVIVDPPRAGLDKKVIELLIRLAPRRCIYVSCNPGTFARDIAMLSPHFVIQQTQPVDLFPHTPHVETVSYLLYNNAFS

SEQ ID NO: 10822 - protein, 292 aa, Lawsonia intracellularis
MKGIILAGGSGTRLYPITRGVCKQLIPIFDKPMVYYPLSILMQAGIREICFITTPHHQQDFINLFGDGSQLGLQLTYIKQSFPNGLAEAFILARNFIAGEPCCLVLGDNLFHGDKLYCMLEDCTGLEYGGKVFAYRVKDPERYGIVSFDENNKVLTIEEKPQNPKSHYAVTGLYFYDGDVSNKAASLKPSARGELEITDLNNIYLQDSGLSVEIFGRGVAWLDTGTFESMHQAAAFVQAVQERQGAKVGCIEEIAWRKGYIDDVQLKKLAEPMHKNEYGEYLFSLLEQNNER

SEQ ID NO: 10823 - protein, 197 aa, Lawsonia intracellularis
MDLILIKRAILSVTQKDGLIELATFLHKHNVELVSTGGTLATLHSAGLPITAVSSVTGFPEILGGRVKTIHPNIHAGILADKNNSEHTNTLQQLGIQPFDLVCVNLYEFEKALMKKFNPYEMVENIDIGGPCMLRAAAKNFHSVLVLPSPTFYSEAIKELSINSMYSSLTFRKKMAAESFKITSQYDTIIATYLENN

SEQ ID NO: 10824 - protein, 135 aa, Lawsonia intracellularis
MLHHNEYTNPLNVVCGILWRNERFLATQRPVNQSHAGYWEFPGGKVELGETLHIALKRELKEELGTTIFSPTFYCKINHNYGVTPLLIHFFQITVFEGEPTPLEGQTLSWITPKEANNLQFLEADKFLLQQLQQR

SEQ ID NO: 10825 - protein, 336 aa, Lawsonia intracellularis
MNVLVTGAAGFIGFHLCRRLLDEGHSVVGIDNLNDYYSVTLKKDRLALLMDEPNFTFSSIDIVNLPNLQELFLQYRFSHVVNLAAQAGVRYSIENPSSYIQSNLVGFGNILECCRHTEVEHLVFASSSSVYGLNTLMPFSVHQGTNHPISLYGASKKANELMAHAYSHLYNLPSTGLRFFTVYGPWGRPDMALFLFTKAILSGEPISVFNEGRMRRDFTYIDDIIEGVIRVMKKTPKINENWNSHSPDPSSSKAPWKIYNIGNNNTVQLSEFIEVLEVELGKKAIKEYLPMQPGDVEATWADIDDLKHDVDFSPNTPIEYGIKKFVEWYKSYYLIA

SEQ ID NO: 10826 - protein, 243 aa, Lawsonia intracellularis
MDQVSLGVIGIFRPWRQAGITHLLIENEALISLLKSDQNYNNKFQSPSFEKEKLKDNSNTIPSFQPNSSDAVKVRHHQVTHTKNSVPLLPLDKWPFAWKDILSRTPKNPFILWTYEELGYDLGGEANPDRRRLLHRLIKDLSLAKGSHAFWPLCLFPDHATSFENMQMFMSGVQHLKPNWVIFMTGITPNQLGLPNFSLFVPQICWGRYMVTTQHIDELIGNEMYYSQLLSFLKKHIQSLHTL

SEQ ID NO: 10827 - protein, 402 aa, Lawsonia intracellularis
MIDKYLLFHCQELLQIHLGVCGSIAAYRAIDLVRAWKDVGLSVSVTLTPAACNFLNPLAFSSVGADPVYTTMFDDIRHPYSHLEPGKTAQAFIIAPASASTISRLAYGQADELLACQALAFSGQPIIAPAMNPNMWNHPSTQQNIKILQDRGCIVIEPEQGRVACGDEGQGRLADLRDIYLIGLKSITPQDFAGLRILITLGPTREPWDGLRFWSNPATGIMGASIAVAAWMRGAEVHAVCGPGSPWLPLGIHRYSVTTALQMFEVAESIWPTSDIGIFVAAVADFSPEKGPEGKFKKDEAGDGFTLRFIRNTDILQKLSNNKARNQKVVGFALESEGLEQAVQNKLYVKKADMIVGNYIKDSVASLSGSVFILDRNGHEARWEAMTKTDIAWRILSWIKSL

SEQ ID NO: 10828 - protein, 182 aa, Lawsonia intracellularis
MLRIYFCVCLCIITVGCSKFDFSSFSNPFSSSTAHVDDVYYGSFPDICIPKSMSIDHNRTLVSVGPDGEKIGLLTFEGRVDRSSLCSAMIHNMSRQGWTLRGVIDGKRTIQLYEKSGRYAILYIYNQQLTTAIEVWVLARLDDGAYQLNLSRETIISQDSPYSSHGVIGDFETELGEKGLNE

SEQ ID NO: 10829 - protein, 203 aa, Lawsonia intracellularis
MDVQKIKEQLSRIKLYYSRNETIRALGVAVAGLKGIVKSSTPPPTELRSLLREGSQLLLHDALIQKYLPAPITYQPGQEKQLFTVLSETYKKIIEDQEKETYLKTRERKQSLDQAFNLGIKLLEQKKISEADKAFTEALTYYKDEERLFYLIAKALIKSHEPTRAFDYIKKGLTFHPTNNDLSKLYDIATRLKAGETSALDEL

SEQ ID NO: 10830 - protein, 437 aa, Lawsonia intracellularis
MQNYPLCFIHASDLHLDTVFSGLSKDIPSNLATILHNSTFVAFNRLIQLCITHRPDFLLLSGDIYNEEDYSIRAILTLRDGCYTLEKEGIQVFIVHGNHDPYSSRMKSITWPKNVTIFDTEVTNVPYTAKDGTLLARIYGISHASNKESKNLALQFHRTEDTCLHIAMLHCTVGSPQHYDRYAPCSTKNLIDAGMDYWALGHVHEYQEISQDPLIVYPGCTQGLHIHEQGEKGCVLVTTKQQGSKLTLYKKFYTLGPVLWHTLTIQLGDTNQPTLQEDISNTLSLDYIEDTFHNALNELIATFTPGWQMLILRLSFTGCTSLDPLLRYGNNLNDLLERLRDVASSSQPVWIKDIQLLTTSPKYYHELLEREDLLGEVVRLSKSINELENIEQIHTTALAPLFSHHKLRKILNYPNQLEFKQLLTEAERLCVELLENN

SEQ ID NO: 10831 - protein, 1320 aa, Lawsonia intracellularis
MRIHSFHIDSFGFFHNQTISNLSPKFSIFLGNNEAGKSTLLDFFRLTLMGYPQRKNNRIKNYLNGHGLQGGSLVLDTNYGNIHITRRPNKGPVIIDQHGTPIDITLWERLLSGITPEVYTNIYGFSLSELQSFETLSTDNIRNALYGASFGTGLQSPSEVIKSLDNTMNELFKPKGSTQPIAEHLHDWEEINKQLIEAEKEAANYDNYALELKKITLNLESLHSKSKELEQQQYHLKKRLDIWHQWEEWRLIQTRLEHLPPISASFPQDGAARMERALEKKEHAAREVTLARTRLNNTLNKIQQCHINHDILCIHKELQTIAEHKSTYKTALIDIPALEAKLQQTKESLNQELLILGKNWSIEKINKIDRSISVREKLERLSVEIELTKEAYDAAATAYNNICEELEVAKQEEIEKQKIYESLPSLQTVLSDTNKDILSRMLIQIEEAERYLPEKKSRYNSLYEDFKNLLTQFHLHPKYNKIETLLKLLNEQNSAIEMVNTIQEKALEEIQANNLLTQTKQKVDQLKLHSKQIEEQIQQLGDVDTKDIVSIYSQINTLRTLLHIFSTEKIRAEEIEDYYQLQVANNNFNNKSSRSIVIGILSSLIGCGIFSIQHLMNSNILPISQNIIILLPLWSGYFFLSSGIVIILKKLFYNYLPLTKNSTITKQLHTRHEKALSKCTELQNKIYTICNELRIETPSLENIEKLNYQIEQKKELYDKKEHLKQEHNKYQKEIESLYQQIDVAKKEHEQKLADVILAKNTWYEYVLEFGIQFVPKPEQVTAFFARVETACNLWSTIELLNNDIAELESYYKNFKNFVNQTLGEYLSSIDCDSIPALINAVKDILTSHQDDELNNSYTQALEDLQLAQAHTKYLIDYLQKLKIQYEHSKTKYDKTCSAWSNNLSNLMLDPNLAPDAIKNMFKQMDHIALLNQEMIKIQNKLEHQQNEKNAFVLPLKHLCQQLGYTPNSDDWITVLDQLLKDATNATLISNEKKTLEEQKSEYENEVKYTQLILDDANQSVYRLLQLANVDDTETFFQHDIIKQKQEELYKQQEEIEAILRLAAKDISSYKSYPDFNMFLQSFSEIEKKDLEVELNEVSSRLIDNKKSIDNFSNQARTLEIRLENLISSDTLYQMKVKQASIVHSMQNIAKKWSCYALAKQLLIEAKSHFEQERQPEIIRIASHIFSTITGGKWIGINSSLEEMSLSILPPHGEPIKPELLSRGTQEQLYLALRLAHIHNHAIQASPLPIIMDDILVNFDPERAKHTISTFVELTNSSQELHMGHQLLFFTCHPHIAKQLLETIPESNLYYIENKKITLAS

SEQ ID NO: 10832 - protein, 214 aa, Lawsonia intracellularis
MNKVIQLGFILMITSSLLGACGQQLVEIPEVLPKVTIGVVGPIQPMGTTDLLAGYIPEDRGFATEENLIELRSLIIDTLRAQTKREYEFIPAADGADPTITRMAGVNSALEYWVAVGKQLGVEFLIIPYVLSWHPREGSSAGVTSSAELTIDFFLIDTKGEGALLGRSHYSEKQVGLASNLLTLNKFIKRGGKWVTTEELAKEAIEKMIKEFRL

SEQ ID NO: 10833 - protein, 315 aa, Lawsonia intracellularis
MSDSGAIKDTDSNMLLDSSQEKFVESMHGEQEQAYLPGITPPVNNTSLIITASGNGGNNNGGGIPPTMSDDDEKPYGMPLLEHLSELRKRLTKCIIVIGVVFITCYSISDILFHYLALPLITVMPADTKLIFTSVPEGFFVYLKIAFVAALFITSPYIFYQIWLFISPGLYDEEKKYILPLSICSAAFFLGGAAFCYFFVFPFVFVFFMSYSTDTIVAMPSLSNYLSFSLKMLVAFGLIFEMPLFAFFLGKMNLINAEKMRSIRKYAILVVFIVAAILTPPDVFSQILMAIPMLILYELSIWVVALSAGHKEKRK

SEQ ID NO: 10834 - protein, 121 aa, Lawsonia intracellularis
MFGIGGTELLLILLVALLVLGPKSIPQIARTLGKALREFRQVSSEFQHTLNTEITFEEHEKKVKAGNTVSSVKNNVDNNETTISESPLSTSDTLSTSFVSSNDKDDGKHSLNKEQAEKASI

SEQ ID NO: 10835 - protein, 513 aa, Lawsonia intracellularis
MQNKVIVIDYGSQFTQLIARRIRELGVYSEVYPCTVSKEVLASLQPSAIILSGGPASVGASDAPQLDDIIFDFNVPILGICYGMQLIAQCFGGILAYSQTREYGPAEFILEGNSILWDGISHKPFSRVWMSHGDTVEFPPPNFTVIGRTNTLNVGAIANEEKKVYAVQFHPEVSHSEDGEQIIRNFLFKIVGIAPDWTMSSFIEKIITQAQKTIGDGNVVCALSGGVDSTVVALILNQAIGKRLHCIFVDNGLLREGEKDEVISYLREHFDLNLIFVQAQDRFLKQLEGIQDPEEKRKIIGHTFIDVFDEEARAIGKVDFLAQGTLYSDIIESIPHRGSSVVIKSHHNVGGLPEKMSLKLIEPLKELFKDEVRKVAVELGLPDSIIWRHPFPGPGLAIRIIGEVTQERLTILRKADKIVEEELKSFGWYKRIWQGFAILLPLKTVGVMGDGRTYENVIALRCVDSRDAMTADWVRLPSQLLETISKRIINEVKGINRVVYDISSKPPSTIEWE

SEQ ID NO: 10836 - protein, 491 aa, Lawsonia intracellularis
MNQDITNKIRYKALTFDDVLLIPAYSEVTPDKVNISAWLTPSLLLSIPFISAAMDTVTESAMAISMARAGGIGIIHKNMSISRQKMEVEKVKKSENGMILDPVTVRPEDTVEHALELMQLYRVSGLPVVQDKTLIGIVTNRDVRFVEDLSNTFVHEVMTRENLVTVPVGTTLDEAKHHLHMHRIEKLLVVNEAGQLAGLLTMKDIDKIQKYPNACKDDKGRLCVGAAIGVGSDCEARAEALLMAGVDVLVLDSAHGHSKNILHAVKVIKHSFPNCQLIAGNVATYEAAKSLLLAGADAIKVGIGPGSICTTRVVAGVGVPQVTAVMECSKAAREMDRCCISDGGIKFSGDVVKALAVGANTVMVGSLFAGTEESPGETILYQGRTYKIYRGMGSIDAMKDGSSDRYFQDTNKKLVPEGIVGRVPYRGPVSDTIYQLVGGLSSGMGYCGASDLKTLFNTSQLVIISSAGLRESHVHDVIITKEAPNYRVDTP

SEQ ID NO: 10837 - protein, 195 aa, Lawsonia intracellularis
MTELQKMLSGYEFESEDNEIYERSLKAQRYIKTLNALEPERPEQQLSILKQLFNYVSPTVRLQTPFFCSFGFNINIGNNTFIDMNCVFLDYNNITIGEGVLIGPCVNIYTITHPISVQERKRLAPNKNDAPLYNATANPVKIGDNVWIGGGSIILPGVVIGNNTTIGAGSIVTKSIPSDVLAVGNPCRVLRNLHP

SEQ ID NO: 10838 - protein, 479 aa, Lawsonia intracellularis
MNFIFFSSIIVIYCLAIFTAAQALLHKKDSKSAFGWIAIIFMLPIPGIIFYWLFGIARVDSRASLLMGKAAYKVLGGKKDLHTGFFVKDPQGFIDSKTLPVNIAKLSMPGQKISDHYVVGGNNVYPLYNGEEVYPKMLEAISKATHRVYLSTFIFGNDFVGTLFIKTINEAAIRGCEVKILLDGIGSFFPIKSWREKLHPAIKLAYFLSPSLLPPKLSINLRNHRKILVCDSNIAFTGGMNISQHHLVTLKKSNRVQDIHFYCAGPIAKQLEIAFLLDWSFTTGETARIPFDPIKKQGSTLCRLIIDGPGSPHETIHDLFCAMSSSAQKNIRIMSPYFLPTPQLSEALASAVLRGVTVDIIIPLKNNHYLLQWAMAHQAPQLVDKNIHLFLQPPPFAHTKLLLIDNDYTLMGSANLDPRSLNLNFELVVENFSTTLTNNLIEFFDKKKSQSYQLTEHTKLPSLPIRLRNAASWLFSPYL

SEQ ID NO: 10839 - protein, 813 aa, Lawsonia intracellularis
MKRSQHRSQKTKDNTLGQKTSKIQKHKPKSYITRQSVQPGSKINGLHILSLLYNSDHPLSSNEIITRLKITKQKKQALELVLNVLQKQGQIVCTKGEKWAIASPMQKVIGTFVVQRSGAAFVIVDQQNTQKPYSDIFIRPELQNGAWDGDKVQVIVYPTKHGKNFEGQVVQILERPRKEVIVRVSQKHEKGGVVCYPVDSKLNVLFIVDTSKLPEKPIENELLVIIPTPNTNGELLMGIAQYSLGVEEDVRVQEKVVKLNYNIPCEFPLHVLKEENVAKDLFIKSKAVFYNVPYQKYDDISQCSTAIRQDLRVIDFVTIDGEDAKDFDDAICVYPTDIGWDLWVAIADVSHFVRAGSLLDSEALARGNSYYFPCSVESMLPEFLSNDFCSLKPKEERLVMATKISFDNDGKTKNVIFFPGVISSRARLTYEQVHLALEVKEISRLPGGIDTLSMLNNASELAKVLQANRIKRGSLEFDLPETRFLINKATRRVIGVIRQERFFSHQLIEELMLAVNEAVATFLHDKQIPFLYRIHPEPDIERLEKLFRILATTDLACQLSGSPDAKKLGGILEEAENTPQTFLISRMVLRSMMQAKYSPEPGEHFGLASPLYCHFTSPIRRYADLLVHRAVKFALGDTQKHIPFGQQLFSIAEQCNSHERVAQEAEREITKRLSCLVLQGDEGKIFEAIVTGITDFAFFVELISMPIEGMVRLASLKDDWFEYNQDRQELLGVRTGKRFYLGQRLTVKVSSVNILRLEIEFELHMMQPTSGENIKKGRTKARNYYRQKEKVRSSNSSFRKRKKKSSSLHQKGQ

SEQ ID NO: 10840 - protein, 484 aa, Lawsonia intracellularis
MDFIELQKNLGFILLPLSYLYTLVMRIRRAIGKIGLLGRLDPYCPCISVGNISWGGTGKTPVIDWLLDWAEQKQLSVSVLTRGYKSDNSSTILPLYVKPHHKPKEVGDEPLMLALEHPNASILVDPNRIRSGRYAVQVLKPDLLLLDDGFQQVGVKKTLDFVLLSEEDLTKQWNRVIPAGSWREGSQALEDASAFLIKADKEKMQSLLPIIQNRLFHFGKPVFSFYLKPVLLKGAGLSEAVTAKEFAGRSYILVTGVGNPNQVLHTVESYLGYSPETHIIFSDHHRYTFQDINRLLSFNLPIICTMKDFVKLQWLPVSELWGLQVKTVFEGYLWSKYSFPQWLAALWDEKHHNIVDSLGEDIEDYKGFNSSVTLFFEEQGEESIPPEYEQSIQDKAVSNDLIIFDDERSDVDEVSVIQNNNNVEVQHTDDHEEIDNMRTTVILPESPQNLYHGSHVMDEATFSNKRERDILRNDSNDNNSERAT

SEQ ID NO: 10841 - protein, 172 aa, Lawsonia intracellularis
MVKERKDIITFLGNPLTLMGNPVSIGEKAPDFTVLANDLSPRTLSDYANNILILSAVPSLDTGVCDIETQRFNSEAAKLGEKVRILTISCDLPFAQARWCGATGVSAVETLSDHRELSFGYAYGIAIKELRLLARAVFVVDTNGMITYQEIVPEMTHEPNYTAIFEAVNTAS

SEQ ID NO: 10842 - protein, 803 aa, Lawsonia intracellularis
MSKNNKISIPLNNTYSLVRWDLLKFEQQLCNSIKLILPFKNYAIYFPQHHLPKNPEWLPEEQKLFLPFWYKDELLGVVMIRNPDPTLTEMLLPVLPGLTTLFLAQLELHKKAQLDFLTGLMTRQNFIQLLTEEIELIQSSLNNNRYGGVEETTHYKSSIAVIIIRFNGLSKLTHEISYNFVENIIADLADIFIQSIPNHTIPARTGEYEFALLIPETNRSQCDTIASKILFCLNQYKKPSPLTDRYISISPHAGYAIYPQDMDRTKKVTMDTHVNLILHKAGLAAETAYSRLFHGGKNIMGYGSLLYEGGEICQILPLAQVAINLGREIGAYEGQHFSVWTTHYHNPKKLKENHIPIYKGEIVLLEVKETSSIAEIVYLGDPTQPFEIGDMLLLLDEEHSLLQEKSYERQQKIKTHKLDPTTGLLQHFDFVTKFSESYRKYTQFSLAIIHTANKTLNSTSQEQINHYIKEIAVKCHLLNNNLNDSELFGGRFALNSLIFFHTNTQPESLYAHYTALSTKISQELNITLSVGIAYWPFLTLQPLDILECCRKALEYALLLPPPHVGIFNSLAINISADKKHCRGDLFSAIEEYKLALLADKNNALARNSLGVCIASLGHYNEAQKHFKEALQLLPTEPMISYNLGMTYQNLGDITSATQYFHNCLTLCPTHLYAAIRLGALAESTNNTQEAIKYYNQALSINKKHALPYRHLAMLAFKEGKKEKAREYLHQALLYNPHDTTTLMLMAKMYLDSGEDPEIAETLSRQCVAQRPDIKSNWIEFARALEAQGKKKEANKAWLKANEL

SEQ ID NO: 10843 - protein, 688 aa, Lawsonia intracellularis
MTYTIHNLHCRGCAIRIEEQIQSLPGISFASIDELTHHLVIEGSAPDLIELNKIAGEILPGVYFEPYSTNAIDEEVSWPPSLWIASLFFIIGILFQEKLYKFSLSVVTDAIFFGIPYVLCGWSVLLQGLKCVLRKDFFNEFTLMGGATLIAIALGDFSEAVGVMFFYRIGEYIQERTLIKSKKSIRALLATKPSIAHLVQKNHIQDVSPESLQPGANLLVRPGEKIPLDGIVESGTSQVDTSPLTGESVPTVVHVGSQVFGGTINIMGSLIIKATATYKDSSISRMLELVENAVARKAPTERFITRFARYYTPLVVLSAILVAILPPLFGLGTLQEWIYRGLILIVISCPCALLISIPLGYLGGIGAASRQGILVKGGSVFDALQKIKIVAFDKTGTLTKARFEVTGILLNKGVSREYLLQSAAMAVTYSSHPIVRPILDIVNQKPQVSGIALKEIPGKGIVATYKETSLVVGNETLLREHGFEPIIVDRPGSIIHVARDANYLGVIVVTDTLKSDAVEAIRCLKKYVNKVVMLTGDRPDSAEGIAKIIQVDEYRAGLLPEDKVAVIESFGPIEQTLFVGDGINDAPVLAYSGVGVAMGKLGAESAIEVADAVILDDSPVRVVDLIRIARKTYIIVLQNIILALGIKTVIMGFGIAGLSTLWEAVFADVGVALLAVFNSTRAGKLKNF

SEQ ID NO: 10844 - protein, 493 aa, Lawsonia intracellularis
MQQYIIFIPIIIYLGLTFFIALLTNKHLTITNSDTFIKEYFIGSRSMGGFILAMSIIASYTSASSFIGGPGAAYEYGLSWVLLAMIQAPVAFLTLGILGKRFAIMARKVNAVTLVDFLRVRYQSDILVVFCCIGLLTFFMAAMLAQFIGGARLFQTITGFSYEYGLVIFVLTVTFYTVVGGFRAVVTTDALQGIVMAISSILILCVVIYNGGGIENCILTLKNIDPGLITPTGPDGLLSPTLMFSFWILIGFGVLGLPQTAQKCMGYKNSYSMHKAMIIGTVVIGFMLLNIHLAGVFGRVIIPDLSIGDFVMPSLIVKLLPEFWAGLFIAGPLAAIMSTVDTMLLLASAVIVKDVYIHYKWKGDISSVSQKHIKQISTGCTLLLGLLVFVLALDPPMLLVWINLFAFGGLEVVFLWPILFGIYWKKANATGAICAIITGMITFWSISIFNFSFGNVYSIVPSLLLSGIAFIIGSYQGQPTSKEILWLFWGEKE

SEQ ID NO: 10845 - protein, 121 aa, Lawsonia intracellularis
MQHRLSKEIFSRNDKNHTYKQYKQSNYEAWLTSCIYIFYSIWWWLFAYVICNGNVLTYSYILGFPCWFFFSCLIGFPLLCCILWFIIHYFFKEVPLDTPIQNYDPNDINSQIQSEHHPELL

SEQ ID NO: 10846 - protein, 439 aa, Lawsonia intracellularis
MLQRHILVSPLYKNTKLSFITSVTHGLIIGVCVGSIISLYRLTHTVCLNFILQILHQWLNYVWVIPLWFCILFIISWIIGKLVAYAPHIAGSGVPEVELTLTGDLQLPWGKILISKFIGGWLAILGGLSLGQVGPSIQMGGLIGDGFSRYWLKQQSNFHIIGGIAAGVCAACDAPIAGLLLVFEQIKYPITIRSLIITIFSVIGAQLVLTYGFGIKRMFNFESFLSPILNETPLLIATGIIIGIGGALYNTILLWFRERESKQKVVPNLFRAAPPLFCAGVLIFFLPEITEGGENLIRQLPSFSYSLYFLAILLLFKVIFSAYSTTGNIPGGILMPILSIGATSGLILGNMFAQQEVIGYMQAKSYLIYGMAGFFAATVRAPLTSIILVTEITGALQCIPGTFLVGFLSHFTANLVQSTPIYTSLKKLAYLRLYNNRNL

SEQ ID NO: 10847 - protein, 248 aa, Lawsonia intracellularis
MKETLHNYTFTTGEKITVIVKKGSPRRKHIAICITSRGQVVITIPYGVMQKDALQIINKKENWIKHHLIKTLNKPQPSPLTYTTGESHLYLGKRYSLIVLKEKKSRLSLQQRIILNKNEIQVTPFSNNSLTVKRLLFKWYYAEAQQYIAKQLYLLLQQIPWLQTVPTWKIKAMRCCWGSCSPHGVITINTHLIKAPTICINYVLLHEIAHLKEHNHSHNYYKLLTKLMPNWINIKTQLENIAPFVLMS

SEQ ID NO: 10848 - protein, 524 aa, Lawsonia intracellularis
MVKEQSPSTVRTRCIKRIVDQCSLWHHCIPIAFAFSLSSIGKSFLFTLPFWSNHWKPNSESFFINKPYGLWITSITILLLGILLHYTNKLNNENSLIHNFIKSFSHIIKQVVPIKSHRIILWKKSPLQPLFVTYLIVILLNILFEQFQPYFSDLFKETMYSIELGVIVFTGLLCISIFPPVYACITYALAIVCNIAFYECTLYIDPSYIHMFQVIAPFLALPLFIIGIPHLEPHYNITNPKKVSRPTVNISNHSLQYVALSLIGLLSTFQFFLNAATIDTFIFINAYLSEKYSATIFMLSSQLIAAIFAIWIIKSKDNAHLMLLLFILGLLGISTILYSILIQKTVPIAILQLASGLITMFCIITFSILVHSQKCMYKILALSIFVMNIVGYFSGYALWNIAIFLKNSSSSIIHIHIPILGIVSVLSILLIQSLYYHIMDISYLCYILSSHDNSMDVYVYQDKLNTLTPREKEILSLVQQGLKNIEISNRLSITEGTLRVHLRNTYRKLNIQGRQSLKSLPHNL

SEQ ID NO: 10849 - protein, 360 aa, Lawsonia intracellularis
MLHNSKIIFPTLSIRIYYFIFCILSIVVGCTVFLLVKQNASDLFLYNLLTINTTILKNKTYPQHIFQLNKNSNQLFSEKNLFRNNQNVPNLLYSNTIHKFTEKNDTKDTFNLLLLCSIFFFAIPYIIFYLFVIYPFINLCHTIEYLYSKNSNKKIFKTTIFEFKKIISIVQKNIIKQQELYHKLQITKTEKKYIQRINSIDYTTGLLDKKCINTYLSKYLGYSVLTILMIDIDHFKAYNDTFGHVAGDKCLAAVARCIKNALKRKEDIVFRYGGEEFIALLPNTAISGAHIVAQRIHNSLTQMKIPNTTSTVYPFLTVSIGINEVLPYKHTTPIDAVHHADIALYTAKHNGRSQTAVHSN

SEQ ID NO: 10850 - protein, 288 aa, Lawsonia intracellularis
MRPETQAMLCRMRDNEATDSQIYRLLSKQTNSLHNKKILEQMAQDEDNHSKIWNKYIGGSPSISSIRVWIFTLLGKIFGLVFVINLLESREIAAIEAYQSISDEIPEAKDIMADEEKHESQFAVLIESEGLTYISSMVLGLNDALVELTGALAGFTFALHDNKVISMAGFITGVSATLSMAASEYLARRSEKTNKHPLKAAIYTGVTYLITVTLLLVPFIICSSPIIALIFCLITAGLIILCFTYVVSVIHRKPFLPSFQEMIIISFGVAGVSFVIGWLARVWFDVAL

SEQ ID NO: 10851 - protein, 233 aa, Lawsonia intracellularis
MTVLAERNDNIEASAFIKSQQKDPLRERVYQYLTRVMSTGGVQHGQAINQDLICKELQVSRAPLRDALIRLESEGVVTIVARKGVYLTPVNEAFLRNAYQVINTLEIECLNEVFDFLTMDHVKELEESNSKQKLFLQQNQATAYHEENMRFHDIFLDLTENALLRRLHTSVANRLHLFCQSACFDDWENQRLSEHERFIAAIKNKNRDDAINILKNEHWSFAQHKDFLERYYV

SEQ ID NO: 10852 - protein, 498 aa, Lawsonia intracellularis
MKCHILIDWLRTVLTLLHNIFYKKLLPFSYIKVVIFSCCTIVLFSTSLILTPIYASGLFSSMGLKEELELGKKFNLLVRSQMAVVEDPEIVGYIQSIVDQLAASMPPQPFQFKASVVLNNSVNAFAIPGGYVFVNTGLIMNMENESELVGALAHELAHVTQRHIARRMERAQIVNVASILGALASVFLGGGNTTGAVFAGSLAAGQTAMLNYSRSDETEADQIGLQYLVKAGFKPQGMEEAFEKIRRKQWASGASTPEYLSTHPDIGERINEIHSRVASLPQSIQARVENNKRFKRVRTLIWARYGEPETAYWLFTKSGEKDCLALMGLGILAERKNKIKVAEDAFHKAVVCAPNDALILRETGMFYYNRGDGTQSIQFLKKALSLDSKDVLAQFFYARALDDAGNSTEAQTYYKQLLKILPEDAEVHYIYGRSLGQSGNVFEAYIHLAYSALYQNDIKKFTLWSEKARSLAKTSEQENQLKSLMKIHEERVEITTQE

SEQ ID NO: 10853 - protein, 485 aa, Lawsonia intracellularis
MHLYNTMEKKKEPLIPIISGKLGIYVCGITAYDFSHIGHARSAIVFDILVRLLRYQGYDVTFIRNFTDIDDKIINRANKEGRSSKEVAEEFINAFHEDMDRLGVLNADIEPKATDYIPEMIECCQKLLEADKAYITASGDVYFRVRSFPDYGKLSGRTPDELRIGVRIVPSEEKEDPLDFVLWKAAKPGEPSWESPWGRGRPGWHIECSAMSEKCWPLPLDIHGGGIDLIFPHHENEIAQTESIVNKPLAKIWMHNGLVQVNSEKMSKSLGNFKIVRDILEAYLPETLRFFLLKKHYRSPIDFSFEGMNETERSQKRVYECIAEVDKALERKSWDSGGSSSSILAELDEQFSLFMSALEDDCNTAAGLGHLFNIIHIVRRALDDKALYSTTDGKVVFEQFREIIRKVDILLGVFGQKPNSFLQDLKTIRIIRNKIDVNQVEELLSKRRQAREEKNFVQADEVRNTLASLGIEIRDTSEGQVWDIL

SEQ ID NO: 10854 - protein, 142 aa, Lawsonia intracellularis
VLKVYIASDHAGFSLKNTLIEQLQDNDYIVRDLGPMTSEPCDYPLYAQYVCEQVLDEIGSFGILICGTGIGMSMAANRIKGIRAALCTSEFQARATRLHNNANILCLGERVIGKSIAIEIVNIFLTTPFEGGRHLQRIASFD

SEQ ID NO: 10855 - protein, 114 aa, Lawsonia intracellularis
MEFQIEWGKVQDLFCVMYTGLWVLVIYVRWFVGLDIFFSLCIARLKKHKNKLEIQLSYFVNTLTPVEQEKLKAELDLVSKDIIQLESKKKSAFSKNCTDVLQRRLLKAYCLVSS

SEQ ID NO: 10856 - protein, 261 aa, Lawsonia intracellularis
MIILLRYVILLELGLLIISCSSVQTKFPIASKDVHEIWYTYERYAEQQGKKSTPYRIKGTLLYHADKAIKRLSVIIWSNGNFPICLDGMAGMNTPVVRLHATQDKFIIYSIIDKEAKVFSNTDKVFLELEKPLPFGFYDFVSLIRGQFYNVFGKQVQGVSPLSMSNGNIIYTLLGGKLSGTLELSQSGLPVKWENSTVGWSLTITYDDQTKLPSKVILFDNKNNKIVFIVKGRETFLQNFTNSQLQLILPEGVDVQYISYE

SEQ ID NO: 10857 - protein, 573 aa, Lawsonia intracellularis
MNVIQFVHNVLRQWPLVQLLLSIGLILFPLQACVAKNSQHNTIHWNLTPEAQVTYGILLLEQSIRIGDKSGVLEAMSILVKHSPAPQFFTDSAAWFLLEKDPITARNILEQGIQLFPDEFGFYLLLADCWLEEGYPVKALESLQAYQLRHPKSDLVRQELAILYLKTENYKEAVDIFSSLPKNYYNAFIRYCYAQSLAALGRSSEAMSQLKLAVQENPEFLEAWFETGKLLEKTGNYSEAIKVYLDLLDKDSGNQSVRLHLISTMLSLKKPDQALKYITESSENYSFCLTAVTLFLENKFYTQAELLLKQIKERPEAAGDINVILYILGAIEYECYKNYDKALTLLEEASSKDKYYINTLLLRVQIFYSLNKINQAMQLLHQGQEAAPLEQELWTTEVQLLLNKKEYNKALIVISKGLELFPEEKTLLFLKGVAINGLGKKSESLELMEQLISRYPDYPEVLNFVGYCLIEDKRDIDRALSLIKRADSLIPNRAYIVDSLAWAFFAKGEIKKAWVEINRAVSLEDSNDPTIWEHYGDIAQAIGKKKDAKIGWEKAIKLQPQDVEAIQKKLQGL

SEQ ID NO: 10858 - protein, 385 aa, Lawsonia intracellularis
MNYDIQSPFLLDKSISEQSFCSKKRKNDDTYKASSSKVEYEKIKRNSKEESEIEDPDTEMDDTLLSSSEDLLCDLIEDSELDEMGFETVVSSQVTLSTTTATRDSLQLYLREVSRFPMLKPEEELRLAQDVQKKGCSKAAFRLISSHLRLVVKIAMDFQRRWMQNVLDLIQEGNVGLMRAVNKFDPDKGIKFSYYAAFWIRAYILKFIMDNWRMVKIGTTQAQRKLFYNLNRERQKLLAEGFDPDTSSLALRLGVGEEQIIEMQQRLDASDMSLDVTVGEETGNASRIDFLPAINPGIEESLAGQEIAILLQDRIKDILPLLSEKEVYILHNRLLTDDPVTLREIGEKYSVTRERVRQLEARLLQKLRTHLSRQIGDFSEEWIGH

SEQ ID NO: 10859 - protein, 155 aa, Lawsonia intracellularis
MYTIRTIFLYTLFIALTHISLAHAEEIKTIQGKELAYFISQNKGKPIFITVFATWCPACRQEMPGIIATQQKYSKEQVTFIGISLDDNVENLQNYIKQSKITFPVYIAGSTIPSMFSITAIPHNIIYDKKGTLVMNKAGALSANELNTMLNKYIK

SEQ ID NO: 10860 - protein, 248 aa, Lawsonia intracellularis
MVMWIGVFFMIVTCPNCLTKFNFPDSQGRPNTKLRCSVCKHIFPLIQEEQKLSFNTVNSSKSSSGGEKKKKWSSTKKLLLLFILLTLTAGIYAWYTYPQLKDVVQHFLFSEKKEEPTDLISLIALRDVVQYNINNEKLGNISVIEGKVVNGFSDPRELIRLEASLYDKNGKLLVSKEQLAGTSVSLFQLQVLGEQELERALTNKIDILANNTNIPPKGEVPFMIVFYNPPDNAAEFGVKVIDARLPPK

SEQ ID NO: 10861 - protein, 443 aa, Lawsonia intracellularis
MAKPREVYICIECGAQFPQWHGQCLTCKTWNTLKIHNAPSTTAQKIYKKLKPIPIGRVETSTYQPFSTGIKVLDHILGKGLVPSSALLIGGEPGIGKSTLLLQLAGATATLGKIVLYVSGEESLPQIKARAERLTVLHDNLLSMATSQVEDILPLLNTSEAPDLLLIDSVQTLTSSNAEGLPGNVSQVRAVATELVEACKQGKTTVIFIGHVTKDGTLAGPRLLEHLVDTVISLEGDRRHIFRLLRVIKNRFGPNQELLIFQMAQHGLEPVADPSTYFLGARDPSLSGTAVVMTIDSQRPLAVEVQALVTKSYLAIPRRTGLGFDVNRLHLILAVLEKRLRLNFSNVDIYVKIGGGIKLQEPGIDLALVAAILSSFYDVPLPERSVFWGEVDLNGQIRPVGSHSIRLSQASKLGYNPIFYPKHEQSGLATVMELQQSLLKKKN

SEQ ID NO: 10862 - protein, 109 aa, Lawsonia intracellularis
MTQSSYNPIEQEGSPELLLQEKIRRPKMYQVLLHNDNYTTMEFVVSILMKIFRKTMEQATSIMLSVHRKGIGVAGVYTRELAETKVNTTHMLAREAGFPLRCTLQEVDE

SEQ ID NO: 10863 - protein, 748 aa, Lawsonia intracellularis
MIGKEMQDVINIAITEVNKRHHEYLTLEHLLYGIVSETTGQKIIESCGGNTESIRAQLEQFFSTYLDTLDEAIPESEIPQTLAIQRVLENTIAHIHSSGRTQIEVGDVLAALLEEEESWAAYCLKKQGVTRIAVLEFISYGLPHSELGNDDFVKKAEESSEEKNPLTKYTIELTQKARNGEIDPLVGRDMEISRTIEVLARRKKNNPLYVGDPGTGKTAIAEGLALRIISGNVPEEFTSSLIFSLDMGALLAGARYRGDFEGRIKSVLSELSKQPKAILFIDEIHTIIGAGSTNGSAVDAANLLKPILTSGKLRCIGSTTHEEFRNHFVKDRALARRFQRIDIHEPSQDDCIAILKGLQSRYEKHHKVKYTPAALHTAVKLSARHITDRMLPDKAIDVLDEAGAAVHLRAGNKSKVLVTRQDIEKVISRMTGIPIKTVSGKEKDRLKNLKKDLSSHIYGQNEAIDKVTKAIFRSRAGLNRGNRPSGSFLFYGPTGVGKTELAKQIAEKLNIAFLRFDMSEYMEKHSVARLIGSPPGYVGFEQGGLLTEAVKKTPYCVVLLDEIEKAHPDIYNILLQVMDYGTLTDNTGRKTDFHNVILIMTSNAGAREMGITNMGFVSDDTNTISHKGRKAVESVFSPEFRNRLDAIVPFNNLSPELMNHIVEKNIKELTKGLAEKRVSVMLSSEAKKWLAQKGYDKKLGARPLQRLLRESLEDQLAEEILFGKLVKGGRVTVKPPLEEDSKLVVMLE

SEQ ID NO: 10864 - protein, 228 aa, Lawsonia intracellularis
MLSALSNDPMYFPPLETAFDNGLLAYGGDLSPQRLLSAYTKGIFPWYDNNSPILWWSPDPRCILLPENFRIPKTIQRELKKCTFSVTINNAFTEVITACATLPRTKQKGTWITQDMKMAYIQLHKLGFSHSIEVWDNSTLVGGLYGVALGKAFFGESMFHIAPHASKLALVWLAQYLWSYNFDFIDCQMPTTHIMRYGATLISRNEFLTRLTIAVTTGTSQASTKEAL

SEQ ID NO: 10865 - protein, 432 aa, Lawsonia intracellularis
MFPNVQHKLGVVFFPAFDWAISPTHPEREERLLYTQDQLYEEGIFDIPGIQEYQPSLSTYCDIESVHFCLPNVGAVCSNSHLASAGGAIHASKLVLTGEVERAFAIIRPPGHHAMRVTYGNRGFCNINIEAVMVEHIRQTYKKQKIAIVDTDCHHGDGTQDIYWNDPNVLFISLHQDGRTTYPGTGFLEEVGGPAALGKTVNIPLPPGTGNEGYLYAMEHVVLPILDEFQPDIIINSAGQDNHYTDPLTNMYLTAEGYACMTQMLKPDIAVLEGGYSIQGALPYVNLGICLALAGLPFSYLQEPDLDKVDICQPKRVTETIKKVCEQALSQYFYPPVKPYDGQQDGCWWVRNRTIYYDTDMIHDTQYERIRLCKTCNGLTAIETKSTCLDEALCLLFPRGACSSCCSEAESLKRQWVQTRNSNILEINPNKS

SEQ ID NO: 10866 - protein, 323 aa, Lawsonia intracellularis
MYIVTGGSGFIGSAMIWLLNEVGIDDILVVDNLAISDKWHNLVNRRFKDYIHRDEFRHLIQKGKAPEDIRAIFHMGACSSTTERNADFLMENNFHYTQMVCRYALENGARFINASSAATYGDGSKGFSDNLLTTLALKPLNMYGYSKQLFDLWAYREGLLNQIVNLKFFNVYGPNEYHKGDMRSVVCKSYEQITTSSFFSLFKSDHPDYADGGQMRDFVYVKDCVKVMYWLFEHHEVNGIFNVGSGTARTWNDLLNAVFIAMNKKPDIRYVDMPDQLKGKYQYFTQADMNWLQKVGCDVSFHSLEEGIMDYVQHYLMAEDRYL

SEQ ID NO: 10867 - protein, 364 aa, Lawsonia intracellularis
MRFVDEVTISVSAGKGGNGCVSFRREKFIPKGGPNGGDGGDGGNIIFKADSRLLTLYDFRVQRHYRAQNGEGGKGSQRHGKKGEDLILHLPVGTIIFEQLLDKEYFLVDLDRPGVEFLIARGGRGGKGNEHFKSSTMRTPRFAQKGEMGEEKYLRLELKILADAGIIGLPNAGKSTLISKLSAAQPKIAAYPFTTLNPNLGVMIDNLDPDKRLVLADIPGLIEGACKGQGLGHQFLKHIERTRFLIHVLSSEDIDEDNPWLGFDIVNEELKEFDHTLMQRTQLLVVNKIDVLQPEKLSHIKQVAESSGKIIYFISAETGEGIELLVDAIWKLQSYRLNAPFIHLKPIEHKSDEEFAIEVAYTKE

SEQ ID NO: 10868 - protein, 102 aa, Lawsonia intracellularis
MYAIIEAGGKQFCVEEGSKIFVSKIDAEVGTEIFFDKIFMIGGSSPQIGTPYINNAKVIAKVLEHGRDKKILVFKKWRRNDSRKLQGHRQDYTALKVTGIQL

SEQ ID NO: 10869 - protein, 101 aa, Lawsonia intracellularis
MNLKPLNDRVLVKRLESEEKTAGGLYIPDTAKEKPSRGEVVAVGPGKHTDDGKLIPMAVKAGDTVLFNKYAGTEVKLDGVEHLVMREDDILAVITGETGRK

SEQ ID NO: 10870 - protein, 548 aa, Lawsonia intracellularis
MASKEILFDAKAREKLSRGVDKLANAVKVTLGPKGRNVVIEKSFGSPVITKDGVSVAKEIELEDKFENMGAQMVKEVASKTSDIAGDGTTTATVLAQAIYREGVKLVAAGRNPMAIKRGIDKAVVAVTKELSDITKPTRDQKEIAQVGTISANSDTTIGNIIAEAMAKVGKEGVITVEEAKGLETTLDVVEGMKFDRGYLSPYFVTNPEKMVCELDNPYILCNEKKITSMKDMLPILEQVAKVNRPLLIIAEDVEGEALATLVVNKLRGALQVVAVKAPGFGERRKAMLEDIAILTGGEAIFEDRGIKLENVSLSSLGTAKRVVIDKENTTIVDGAGKSEDIKARVKQIRAQIEETSSDYDREKLQERLAKLVGGVAVIHVGAATETEMKEKKDRVEDALNATRAAVEEGIVPGGGTAFVRSIKVLDDIKPADDDELAGLNIIRRSLEEPLRQIAANAGYEGSIVVEKVREAKDGFGFNAASGEYEDLIKAGVIDPKKVTRIALQNAASVASLLLTTECAIAEKPEPKKDMPMPGGGMGGMGGMDGMY

SEQ ID NO: 10871 - protein, 293 aa, Lawsonia intracellularis
MIKYIDWIQKTTMMFKKAGIDSPKLSAELILSHVLNITRLQIIMTPFEPIPTNSYSTLNDIMLRRLHGEPIAYLTGKKEFFSREFKVTQATLIPRPETELLIEFVLNHINPTQQIYFADLGTGSGCIAITLAAERKNWLGIATDISSEALKIAKLNSLKNNTHSQLQFLQSDFTQPLCLPSSLDLYISNPPYISENELTSLPHEVISFEPKIALTPHKCIHLDEINTVLHCYKKIITQAEISLKPGGIIILEHGATQAEAILLLLKNNIWTNVISHTDLTNKNRFITAYKYKI

SEQ ID NO: 10872 - protein, 304 aa, Lawsonia intracellularis
MQQTTIQRSITFSGIGVHSGQCLNVTLHPASENTGIVFEVITGDTRHTLIPSPSAVIATKLATTIGNKNITISTVEHLLASIRGLEIDNIRICVEGAEIPIMDGSAKIFTNELLQAGIKYLPATKKILQVIKPVEFIKGEKRIRALPYNGFKLDYTINYIHPIIGHQRLVLDVTPTTFLSIANARTYGFLKDVEQMLKNGLAQGGSLENAIVLDSTKVINPEGLRYPDEFVRHKALDFIGDMAMMHLPLQGYFEIYCSGHQHNNQFLHKLQDENALALVTLEGEKTQNLYQNITPLYNDVLALL

SEQ ID NO: 10873 - protein, 648 aa, Lawsonia intracellularis
MNASRSPIILLPEALQNQIAAGEVVERPASIIKELVENSLDAKATDIEVIMENGGHTFIQVRDNGFGIPPAELRLALTRHATNKIKDLGDIWKIHSFGFRGEALPSIASVSSFKIESAYTKESNNTEAAFLQIKHGKIEKEGPSSLYKGTIITVQDLFATVPARLKFLKSPVTEQKRAQEIFSRLALTTNTTMTLFSGARELLKFPAAHSLHQRLKIIWPEELTSNLIPVDKTTHDIRIHGLTSPPTQTQLRSDRVLLYVNGRTLNDKLILRAIFEAYKGRLISKEYPQAVLFIEISPELIDVNVHPAKTEVRFRDEKSIFSAISTALKEAINKTIPSFSLQQTDTDIHPKGFWGEADQEYIFPIKKNSNIHPTQTEVCTTQSTTTDSHGFSLQHMLQNTFVLEPDCQQSLSAKESTYTLASSYSSHPSDNSSLLPNLTSNSTDSNKENEISIKYIDKKMCIGPYHYLGQIGDTYLILEDIRKKNEQAELIILDQHAVHERILAEKFRNGSLINQSQQLVLPIQLKLHYSEQEELQEIANSLTSLGFIFSLKGDILHVESIPPLLDRSQATIILRKALSRQQENIEKLWISMACKAAIKAGLPLPPDEAALLITQWISIEKRENCPHGRPCVLVWTIQDLDKLFKRRS

SEQ ID NO: 10874 - protein, 514 aa, Lawsonia intracellularis
MQSSLKIQFFLFLIGINVLSRTIIAMAAPTNPVAITLYPTGGWIQVVEELPVQDDKVYFELPAGAQLGSLLLSIEGQFIGSIETTPIASIDSPVVAKIRERYTKAVQEVALIRGKLAAVKAKIALWSNPECPSRSIEEIKKFDSMMGSKIEELYVAESTIEPALKKALYELELLEKAIVDAGGKNTYATAITAVIRPDKTNKKPNKQVIVQYGYMLSDCGWNPIYRFDALPEKGIVQVVQEAEIRQASGQDWRNADITLASVNIGSALVPPNLPDWKILPAPIQTYRQGQEVSPIADNAMYLAKSSVPIVHAQEEPTFTTWSLGKVTVPAGMVMRFMLYKNDWDAKFFRLLRPSVQPHSYLVANIDIPSSVDLIPGSAQFMVDGKVVGNGYFTLRSEENHIYFGVDPRVTAQMILDKSQSGRDGFLDKKQSHSWSWNIKVCNDHTVPVKVVVEEPEPQSGDIGIIITTQSNPKPIIEDHMYLWKMTLPAEGEIDIQHSVLMTAPGDMRIIEGRR

SEQ ID NO: 10875 - protein, 831 aa, Lawsonia intracellularis
MFSFFIRKIFGSKNDRYLKSLSPILDQINALESTMKALSDKEIPVQLATFKQQLQEGKRTIDELLPEVFALVRETSFRVLGMRHFDVQLIGGISLHRGKIAEMKTGEGKTLMATLPVVLNALEGKGVHVVTVNDYLAQRDAEWMGALYSALGLTTGVLTSGLSDDARKEAYAADITYGTNNEFGFDFLRDNMKFYPNQLVQRGHFFAIIDEVDSILIDEARTPLIISGGSEQSTTMYTQIDKIIRNLKPQQDFSIDEKGKVVILSDEGAVQVEKALGIDNMYDPSNIAIQHHVLQALKAHYIFRRDVDYIVKDDQVVIVDEFTGRLMPGRRFSDGLHQALEAKEMVTVAAENQTLASITFQNYFRMYNKLAGMTGTADTEAVEFAQIYGLEVVVIPSNKPMIRKDHSDVIYRTRKEKFDAIVKAIIELHKKGQPVLVGTISIETSELISSMLRKKNISHNVLNAKHHAQEAEIIAQAGQVGKVTIATNMAGRGTDIVLGDSVVELGGLHILGTERHESRRIDNQLRGRAGRQGDPGSSRFYLSLEDDLMRLFGSDKLSGLMQRLGMEEGEPIENIMVSRAIESAQKRVEGHHFEIRKSLLDYDNVMNQQRTVIYTLRHNIMNDPEPMDIILEYLDELLSDIYIELEDNDNNELNKSIHTQLYDIMNLSQVMSIDNTLPTKEQAKTLILSMFEKLKSKAGEAYNDLLRYVLLEELDRCWKDHLRNMDFLREGIGLRGYGQRDPKLEYKKEGFVLFQELLANIREGVFRTFTRLHLEKKEDNFFQHEPINDLWYPASHEKETKFQVKKTDRVGRNDLCPCGSGKKYKKCCGVH

SEQ ID NO: 10876 - protein, 338 aa, Lawsonia intracellularis
MTNSLLLDCGSGGRASQRLITGLFLKYFDNDILRTLNDAAIVSLSSPVAISTDSYTITPLFFPGGNIGSLAIHGTINDVSMLGAKPLYITCAFILEEGLELDILERIVASMAEAAHTASIKVITGDTKVVPRGCCDKIFINTTGIGEVLVDPAPSGSRAEPGDVIIVSGSIGDHGLTVFGQREGIDFLSQVESDSAPLNVMVEQLIQEVRDIHVLRDPTRGGLATTLNEIASQSSVVCYIEESLMPIHDVVRSGCDILGLDPLYLANEGKLLCILPSEKEELALDVMRSFPQGSEARKIGFVSDAGKTTRPGQVILHTVIGGYRLLNMLEGDQLPRIC

SEQ ID NO: 10877 - protein, 465 aa, Lawsonia intracellularis
MINPRKTYSLKSVIIAVATAQFIMPYMLAGVGPLLPVIGMHFNATAVELSLINAVYALSLTIFHLIAGRISDILGLRRVFLIGLGLFTCTSGILPFSPNITFFFILRFIQAIGAALMNTSGLSILTNCSPKDRLGQTLGIASIGIYLGLSLSPCLAGIMAKFFGWSYLFYLMIPIGLIAWLLMKYTVKEEWYIDAEYPFDWTGSILYAISISTLSIGMIWILNGIWPIVFLSIGIIFFGSFLKVELTEDHPILDIKFLIHNHAFLYSIFALLINYSSIFGLAFYFSLYLQLGYGLSVLTTGLILSLQPFVQVIISPIAGRLADAFGAIKIAIVGMIMCGVGLFLAIILEIHSNIFEIAYIQMILGLGAGLFASPNMTAIMSAVDSKHMSQAAGLIGTMRTFGLLLSMLIISITMNIYFGGEILTAKSMDKFTAAMDMNFWIFSLLNIVAIIFSIMTLKVKRKISI

SEQ ID NO: 10878 - protein, 105 aa, Lawsonia intracellularis
MDIKDVNNNPYGMVTSQGDLITKSNKVARGKTDATSGEPYPQEDKVILSPKGKLYVEVYREAMHSIDIREEKVASIRAAIESGNYKINSKDIAQNMLGLESEIFG

SEQ ID NO: 10879 - protein, 136 aa, Lawsonia intracellularis
MKIISFQTRNMLKKYEQQLVTARRLERYRQAISLIEEPLSLSKIIKRKILVRLVAKEFFKNFLITGYNSSVVQDVQKELIEKFNNKICFQYPPESPEVVILVKVNNEWEKVGSKLQTEILCLAWTMILDKVNTTML

SEQ ID NO: 10880 - protein, 421 aa, Lawsonia intracellularis
MTRKDRTEGIYSRREVLDESERRQYYLIQLKELLSYAYRYSEDVKKRFDRAQFNVEKFKTLSDLKHIPILKKKELIFLQSIGPRLGGLLTKDIGDLKRIFLSPGPIFDPEDRTEDYWGYTEAFYSVGFRPGDVVQVTFNYHLSPAGLMFEEPLRILGCASIPAGPSDAGTQLDIMQKLRVSGYVGTASYLMHLTQKAEEKGINLRKDLFQEVAFVTGERLSEKMRSQLEKKFDIILRQGYGTADVGCIGYECFHKTGLHISNRCYIEICHPDTGITLKDGEVGEIVVTAFNKTYPLIRLATGDLSYIDRSPCICGRSSPRLGSIVGRVDTTARIKGMFVYPHQVEQVMARFEDIKRWQIEVINPDGIDEMILYIEANNFHQEEELLHLFRERIKLRPELRILVPGTLPPHIKPIEDKREWD

SEQ ID NO: 10881 - protein, 268 aa, Lawsonia intracellularis
MIIEQFFNTPIGMALLAGIVIWGFTTVGAAVVFISKEFSRRTLDLMLGFAGGIMIAASYWSLLEPALEMSEYLGKWSLVPVGSGVILGAAFLRLLDYILPHIHIVEGVLDGRKSKLPRSTLLVLAITLHNIPEGLAVGVVFGAAGLGTPEATLSSAISLMLGIGLQNIPEGLAVSGPLLREGYSRKKAFLFGLFSGIVEPIAVIIGALAVTTVTTLLPFALAFAAGAMIFVVVEEVVPESYASGNGDSSSMAIILGFVVMMCFDVLLG

SEQ ID NO: 10882 - protein, 279 aa, Lawsonia intracellularis
MPELPEVETIVRTLEPIINGRMCLNYTVYNQDSVQGDISLDVLIGAIFGKPFRRGKLLLIPLVIKDSHVYTLCIHLKMTGRILVYPQDRCPTTHTRVSFSLDDGNTIFFEDIRKFGYVRILSTTEEPVWPFWNTLGPEPLEIDVSTFIERFRGRRGNIKSLLLNQRVIAGCGNIYADESLFRAQISPMATVSQLSMESIATLYHALQEVLLEAIASCGSSIKDYRAADGNVGAFQNSLNVYGRFGKPCVVCKKDLEGTRIGGRMTVWCSSCQPINGSHE

SEQ ID NO: 10883 - protein, 103 aa, Lawsonia intracellularis
MRTLNIIENAEFNDISMKKQMVNKGSSFYILNFNLKKGQELPLHHRDIDGELAIYIIEGEGVFLKEDGTFPAKKGEILIGNIREPHGLRAHTDMIAIAAVTPH

SEQ ID NO: 10884 - protein, 262 aa, Lawsonia intracellularis
MILKVPEKYSICIICVIIFLSVNLFFPLSIQAAEDIAIPNLQLTLSGGQTEPEKVSLLLEILFMLTVLSLAPAIMLTVTSFTRIIIVFHFLRQAMGIQQIPPTQILASLAIFMTVIIMFPVGKQINDTALQPYLDERLGFSEALTRAQAPLRTFLFKHTREKDLSIFYSIARMEQPKNKDDVPTILLSAAYVISELKTGFIIGFLIYIPFLIVDMVVSSVLLAMGMMMLPPMMVSMPFKLLLFVMIDGWNLLIGSLVNSFLL

SEQ ID NO: 10885 - protein, 164 aa, Lawsonia intracellularis
MAWLYLISSLFSTIAVVQENKGSNVDKFSKVDTVVDQAIHTANEVATHADATFSWGNYFQAIGFMCLLLAGLWGAVWLVRRYGKFNFIPSPTALPRDALRMEAQLPLGAKKGLAVIKFLDRRLLIGITEKNIILLKDTILYNERDAQGFEHLLNGAEQHDSESS

SEQ ID NO: 10886 - protein, 164 aa, Lawsonia intracellularis
MATEEELAAEWAASLEKTEEESAKVEEEELADAWASALAETEQQAVQEEKEKGFGSHAIEATFKDMTDIARTPRPEGSRRELDFILDIPLDVSAELGRTRLLINELLQLGQGSVVELNKLAGEPLEVFVNGKLVARGEAVVINEKFGVRLTDIISPIERVKQLA

SEQ ID NO: 10887 - protein, 189 aa, Lawsonia intracellularis
MPVDELPENNDTGGKPKKRSGLKIFIILLVLLLLLGVITGASWWLFLRSDATFKHLLEGGGNPGTSQEQSDNANKKEGGKGSSPTDPKPLLKPVSLPSVTVNLADPSGSKYLRIGMDVELSSEEAITNLLTQSARVRDAIILLLSSKTSDELVSAEGKVLLKNEVASRLNQILGEPRVVRIYFTDFVIQ

SEQ ID NO: 10888 - protein, 233 aa, Lawsonia intracellularis
MISEEFLKERLEFLHDQIQQAVVSSGRDKKSVKLIAISKFHPVKTIVNVFNYGQKAFGENYVQEAIYKQSELSGLPIEWHFTGRLQTNKIKNVVGQFEYIHTIDSIKLAKLLSSRLPEDGPSQKILLQVNIGDEPQKAGITVAELPFLAETILSLPKLKLCGLMCLPPITHKGKVVSCYFTKLRELRDRLEVLLDITLPELSMGMSNDYIQAIKEGATLIRIGTSIFGHRLNN

SEQ ID NO: 10889 - protein, 324 aa, Lawsonia intracellularis
MNTQSSSNIGDKLKTYRCGWVALIGPPNAGKSTLTNTFVGQKVAIVTSKPQTTRNKIGGILTQDDMQVIFLDTPGICSEKNHVQGQLGKLMLQSAWQGLAIADSIVCVLDGGLYLKKPDLMDRDIEPFVEVLRQEVRPIVIVVNKIDVFHDKSRMLPMLAKLGEYFPTAEIFPISARYKNGTDKLLDTICLKLPEGEAIFPEDQLSTVPVRFMVAEIIREKLFEQLYQEVPYAVAVEVEKWDEESRKNQVVIYAVIYVARASHKAMVIGQAGERIKSIGTMARKEIKALLGKKVHLELWVKVRESWINDNQFLYELGFGTEEIG

SEQ ID NO: 10890 - protein, 286 aa, Lawsonia intracellularis
VTSQIKTFILLAVLSGLLIVIGGVLGGRTGLIIAFGLALLMNIWSYWYSDSFVIRMYNAEPLSFDEAPMIHTMIEELAQSAGIPKPRIVVIPEDAPNAFATGRDPEHSVVAVTEGIIRILSPEELKGVLAHEVAHIANRDILIQTVASVIGSAIVSIANLLQFTAIFGFGQHNEDGENSNPLVVLAMALLAPIAATIIQFAISRSREYLADATGAKLTGKPLVLAGALEKLFNWNQQIPMQQGNPSTSELFIVAPLFSGNMATLFSTHPDIHDRVIRLRAMVQNHN

SEQ ID NO: 10891 - protein, 564 aa, Lawsonia intracellularis
MYIGLDMGGTHTDAVIINNKTVVAEAKVPTNHKNFSSSIEQALTQLFFTSKISSSLVTRITFGSTLAINAIVQNKQSPVGLLLGSGPGINPNWFTIGEHSFLTSAKLDHRGIEINPLQRGPLQTCINEWKKNGINTFACVSKFSIRNPKHENDMELVIQKIFEHYTTPVISKGHMLSGSLNFPRRITTAYWNAAVWNIHNKFITSIELVLKKFSINAPTFLLKADGGSIPLALSRSIPIEAIHSGPSASIMGLIALYPTSETCLLLDIGGTTTDISIIVKGKPILSTSGLIIQKKPTLIRALASYSIPLGGDSLVNIQLMDGIPHIKVGPLREGPAMAFDGEHPTFLDCLNILGYAQVGNITKSYDGISLLSKKYNIIPQDIAQSVVYSAQQQLQEGISHLLNEINSKPIHTIEALLENHNVQPTLCIVTGGPASSIKPLLNTILNLPIITPTKYTLVTNAIGAALTKPTAVLELYANTERQVCLVPSLNTQYPIPNSYSLKEACHDASNILKKYLQDITNTTTSPIIDIIEAQEFSTLDMVGKKGKDIRVVCQVRPELEFSLN

SEQ ID NO: 10892 - protein, 409 aa, Lawsonia intracellularis
MTKLSPLMKYQTLTYGLSIQQGLVVDPKIVFFSGGTALREVASCLTQYTKNATYLITPFDSGGSSAVLRQAFSMPAVGDLRSRLISLADRTSPEYKEKIFLFEYRLPKQASSKALLDEMCQLRDGNHPMMYHFSNVTLQFVKEEIRFFLTQLPEGFDLSGASIGNILLTSRYLQENRDLFAAVTFFSHWLGSKGVVRPLIDANIHLCVQLENGEIYIGQHRFTGKKDSQVSSPIRKIWFSKSLDKVELAVLKADTFICEYIHSADLICFPMGSFFSSVVANLLPVGIAEAICNTCCPKVFIPNLNNDPELFGLSLKEQIQYLGYILRSGEAKQNIYPDIILVDRNTNNYPGGIPYKWLIRNGIELISTELITKTYAPYFDPQKICQTLIQILNRNVYNITQSTMNNSYC

SEQ ID NO: 10893 - protein, 882 aa, Lawsonia intracellularis
MTDVTLPKAYEPKDIETYWRDHWERNNTFTPNLNEKGEPFCIVIPPPNVTGILHIGHALNITLQDILCRHARQQGKKVLWIPGTDHAGIATQHVVERMLAKENVSREQLGREAFIQKVWQWREKYGTHILEQLRRIGASVDWTRERFTMDDGLSQAVRKVFVELYKQGYIYKGKYIVNWCTYCHTALSDDEVEHRTEKGNLYYVRYKLEDGSDDLIIATTRPETIVADTGICINPKDKRYTNFIGKKAVVPIINRIVPIITDSYVDQNFGTGVLKVTPCHDVNDWMLGHRHNLAFIQAINDKGIMTDEAGPYTGLSKEACRKQIVEDLQKHNHLIKIEDIEHTVGYCYRSHTVIEPYVSEQWFVAATKMAPQARAAVPEQTKLFPKSWLKTYYNWLDNIRDWCISRQIWWGHRIPAWTCTSCNKLFVEETEPSSCPCGSHNLIQETDVLDTWFSSAIWPFSTLGWPNKTPELAMFYPTSILVTGFDILFFWVARMMMFGLHFMKDVPFRHVYIHALIRDSEGRKMSKSLGNSIDPIQMIEKYGTDALRFTLTAFAAMGRDIRLSEERIEGYRHFMNKLWNASRFALMNLPTDSVQLVSIEEITALHHKWFLHRLEEVKIDVNDSIKNYRFNDMAQTLYKFFWNEFCDWYLEIIKIDFKEEGLHKTQAQYVLWLGLKELLILLHPIIPFITSEIWKALPGHTQELACEPFPSTRSHCLSPNEANQMIFLQEVISAIRTIRAELNISPSYKLSVLLRPIDSIQLSLLQKNSNLIITLAKLETLTIDSNQKAPGPSANHIIQHCEIIVFLSGAIDFNAEYKRLTKELNKIDTELQKITERLKNKNFIQNAPKEIVQKEQARKDELLSSHQKIYVLMNQYLNNIDK

SEQ ID NO: 10894 - protein, 851 aa, Lawsonia intracellularis
MAYLSISKNQCKSFLITLVTIFIMTSIPQLAEAVEHFANGVPTVVQDVNVPADSYFGGADSAVGPNPIASTHLTISTTQGFGQNALEFVVGGSLANGNGNPANINGDIVLIVENTNTQNSIIGGSMANAAPVTIGGSIFMTLRNVTAVDPIFGGSVDVRFFAQQQPNEDQLVGGDININLENVTTPEFYGLGYANGVIPVNVLNRNFLVAVQGNITTNISNSNIATVMLGSHYDTTMAVGGNGTINVDNSTIGYLSASNSSDFVNPDLTNTVTFNIGPNNRIANIFASNNGVIPHFIVNMDGSGTEIQELTLGNVIRGGLVLTSELNLSQGTINNLITGNEYYDRSGLRTTVNVRGGTIGVLTSGGSDYSELNFIPGEISTILATNSIGNQDFASLSQVTIHQGAETLWGMRDEVFELQTNNLQLGGELFIPADGTGGVALITNHIIANSGVITPVNMSPERMTPIIGFLEPTGEVAQLTIYGPLTVNLSHSPEILGKIITQPIPIAVTNSDVFGTSKLFVEHNTKGLIWSDIIFNPQDKTWYLTNFRGSEDFYGLSAAREASNWLRQQHIWSLQRRSNKLLDHGVDGLWMNVQGGYEKLDAAIGDAKMPWIMASLGYDFMHKLSDFYNLKALYGFGFGFATGKNKWNTINSTTNDIYMGLVGAYVGLMHEATGLYGTVSGQFATNRTKTKCTGFDETYNWKENVPTEAIEIGWKWSIDEFKINPRGQVIFEQLSKHHFSLSQEGDTAILDKEFLTTTVIGISGEYDLDLRSKIIKLQASVDWIKGISGDFAAKSEVLNMKFKDKNDTSTFRGTLGASAQLLENFEVHLDIFGDLGNDKGIGGQVGATYRF

SEQ ID NO: 10895 - protein, 963 aa, Lawsonia intracellularis
VNTHYTLIREVKIPEVSGIAKYWRHNGTNAEILSISNNDENKCFGVTFRTPPHDSTGVAHILEHSVLCGSKKYPIKEPFVELLKGSLQTFLNAFTFPDKTCYPIASANLQDFYNLIDVYLDAVFFPLITKSIFQQEGWHIEIEDTKKPLTYKGVVFNEMKGVYSSPDAILMEKSQQSLFPNMLYSLDSGGDPKIIPQLTYEKFIEFHSSHYHPSNARFFFWGDDPEEERLMRLLPILSQFTEKKIDSTIPLQSYLQKENVLKVPYATGEQSEKGHITFNWLLCPTTEADEILLLEILEHILLGLPGSPLRKVLIESGLGEDVTGVGFEKDLQQTYFSVGLRSINPESSHKIEKLILQTLEDLSNNIPTPIIDAAINSIEFSLRENNSGKFPRGLTAMLRSLRTWLYDADPLIPLRWEKPLSDIKQRHANGEKIFEKAIRKWFIENKHKSIVTLIPDSKLAEQRENDEQKQLKQIKDSLSELEVNQLIKDTITLQENQQCPDTPEALATIPSLTLKDLPPKNAVIPCIVENDKQITILKHPIDTSGIVYVECLFSLDAVPDDLLYLVPLFGRCLTELGTHKHSFVELGVLLASKTGGIDISPLITTTRGTQLPVAKLCISGKATEDHITDLFSILEEILLETQFDLKDRFLQMALEERARIEQALIPAGHNVVITRLRSPYSIAGQISENIGGVSYLEALRNLTERIHSDWHSIHTDLTKLQQIIINKQHTIFNITASETLLLKTLPLINQIEYKLPYVENNPILRTTKKPLIGEILQVPSQVNYVGKGCNIYELGYKWNGSAHVITRHLRMAWLWDQVRVQGGAYGVFCTLDRMNGSLTQVSYRDPNVERTIKAFDQSANYLKNLQLTDRELTRAIVGAIGDLDSYMLPDAKGMASLTRYLTDDQDEIRQHMREEILSTTKKQFTEFAEVMAEVAKTGSVCILGGSAATDIAQQNNWVIHQLL

SEQ ID NO: 10896 - protein, 572 aa, Lawsonia intracellularis
MSKRVIIIGAIAAGPKAASRLRRLEPTTEILMVDKNEYISFGACGIPYYISGEINSIDSLRSTAYGVLRTPEYFQQKGITTYNRTQAISIDRKQQIVLLKHLLTNKEYTVSYDKLVLTTGSKPKLPTIKGQHLKHIVTISNTSLDSAQHIQTLCASKKIKHAVIIGGGFIGLEMAVSLAGKWKIKTSIIEVKPQVMPGYVSPDFADMLCHDLTKNNVEIFTSEQVLQFKGKNDSVNYLITDKRKIETDLVIFATGFLPETTLAQEAGLALDPKTGAILVNPYMQTSDPNIYAGGDCVAVPNPITGEHSWFTLGSLANRQGRIIGTNLAGGSDTFPGAVGNWCIKLFTLSACGAGLTLEKAKSLGFDAISASIEQADRSQSYPEHSIISLELIVDCSNRRVLGIQGICSASDVVKARIDAITMLLQYGHPTIDDISNAEMSYAPPFSSAMDPINVVANVADNILSGQLESVTSKTFTTMWNDRKNNTIFFVDTRPTTASKELKEKYPNEWHTIPFEEISSYLSELPKTQPIALICNTGLRAYETMSYLRGKGITNTIDVLGGMYAIKKRGEEL

SEQ ID NO: 10897 - protein, 271 aa, Lawsonia intracellularis
MQLVKPFLKWPGGKFRLLDRILYHLPQGERLIEPFVGSGAVFLNASFKEFCIYDSSPDLIGLFQVLQQEGEFFIKICQTFFTTRYNNANTYYTLRTIFNHSIHPFERAVLFLYLNRHSFNGLVRYNSMGLFNVPFGRYNNPYFPKKEMEAFLKKMKETSITFAVCDFRDAFKNLYPGDVVYCDPPYLPLSNTSNFTTYSGTVFSYDDQKDLANLAYKASEQGIPVVLSNHDTPVTRELYSMAKIDCFSVQRFISCNGKDRRAAPELMAIFT

SEQ ID NO: 10898 - protein, 270 aa, Lawsonia intracellularis
MIHSIILQGLFFITAILITGCAITPYTERSQLLLIPTCVEEILGSELTSSLLEKEKIEKDSKFSKKVNEIGKRIAAVLPKSEYEWRFYTIDDDTVNAFAVPGGSVFVYRGILQVAKTEEQLAAIMGHEITHVILRHGSERMSQALLLQIGGEVGAATIDKYGKSSYAEIFRQVYGTASTVGILLPYSREHEYEADHVGILLMADAGYDPQESIQLWKNFSLLDKKSIPEFLSTHPVNENRILALEKIMPEAIIRFEKSGGKPGPTPLGKL

SEQ ID NO: 10899 - protein, 754 aa, Lawsonia intracellularis
MGKNLIIVESPAKVKTIKKFLGSGYVVQSSVGHIRDLPKKNIGVDESKNFSPHYEIIPGKEKIVQGLRETAAKVDTVYLAPDPDREGEAIAWHVAELIKDKNSNIQRIQFNEITSKAVQEALSHPQKLNKNLFDAQQARRILDRLVGYKISPLLWKKVKQGISAGRVQSVALRLIVERDEERYTFIPEEYWLFKANLEGSNPPPFKVELWKVNNKKPIIPDAVTAAALEQQIKDKPFIVDSIEEKERQRSPKPPFITSTLQQAANQRLGYTAKRTMNIAQRLYEGLELGDKGTTALITYMRTDSVRIANEAKLAAATLIEQKFGKEYLAKGGNGRNFKGKAGIQDAHEAIRPIDVTILPEDVKPYLAPDQYQIYRLIWSRFIASQMSVAQFHDTIITINCENSQWRTKGERLLFPGFLAAFPNTKEEEDTNLPVLHKGEILKLHSLIKEQKFTQPPPQFTEASLVRELEELGIGRPSTYASIISTLQDRDYVRLEDKHFIATDLGRVVCMLLQDYFKNLMDVTFTAHMEELLDKVAEGKQDWVELLQNFSETFNPTLEEATKAMSQVKTGLETDINCPDCKKPLVIKFGKSGQFLACSGYPQCKFTSNYLRDDKGQIHLQEKVQPELQKIGICPKCNKDLVLKKARTGSRFIACSGYPECNYTEAFSTNVPCPCEGCKGMLVEKSSKKGKVFYACNTYPTCDYAIWNWPIQKSCPTCSFPILVEKITKAKGKHLACPEKNCRYTCELEESDIET

SEQ ID NO: 10900 - protein, 208 aa, Lawsonia intracellularis
MSIFTIPLGMLETNCYIIQKGKNALVIDPGGTSPEDLSIITTFITQNKLSIQAILCTHLHYDHIFSTAMLHKQTNVPVFASTKDDFLLKTQAKGGIGKLACPKIEIFQHEDLTEGLHTFNTFSCEVINTPGHTPGGVCLYFKEMNTLFTGDTLFYHTVGRTDLPGSNTNDLFTSLHKKIFVLPKYTIVYPGHGPKTSIEEELTNNPYI

SEQ ID NO: 10901 - protein, 397 aa, Lawsonia intracellularis
VSNRIKKVVLAYSGGLDTSVILKWLIATYNCEVIAVTADLGQNENFHDIEEKAIVTGASKAYVVDLRNEFAKNFIFPMLRASAIYEGRYLLGTAIARPLITKLLIDIARAEEADAIAHGATGKGNDQVRFELAAAALAPDIHVIAPWREWDLISRTALTTFAEKHNIPISTSHKRYSKDQNMLHCSIEGSELENPWEEPHIESYTMTVPIEHTPDSPEYITIDFEKGDPIAINGQQMIPADIMFTLNDIAGRHGIGRIDMVESRFLGIKSRGVYETPGGTIIHIAHQDLEGITLDHMTLLTRNQLIPSYADAIYNGFWFSPEREAIQAFMDKAQERVTGTVKLKLYKGMAYPIGRKSSNSLYSSQLATFEEDTSYNHNDATGFIKLKSLRIRGYQKS

SEQ ID NO: 10902 - protein, 460 aa, Lawsonia intracellularis
MPKKKLWGGRFHEKTASPVEQYTQSISYDKKMYAQDIAGSKAHASMLGRQGILTSEEVLLLLNGLDSIQKEIETDTFPWKIELEDVHMNIESRLTDLIGTVGEKLHTGRSRNDQVALDFRLFVSDNISLWKRQLLELIGIFVAKAEEYKDTILPGFTHLQPAQPVSLAQHLLAYAWMFKRDVQRVYECNQRVRVSPLGAAALSGTTYNIDPFFIANELHMYGVFDNSMDAVSDRDFVIEALFCASVIMMHLSRFCEELIIWSNPAFGFVQLPDAYATGSSIMPQKKNPDVAEIMRGKVGRVYGALYNMLTILKALPLTYNRDLQEDKEPFFDTNTTIQSSLSIMADMLAAITFNKNKMASALSDGYLNATELADYLVTKGLSFREAHHTTGSIVALAEQQKIPLEELSLQDFQSICDKIESDVFHVLDYHVSIERRKSTGGTGYHSIEKQIEKLKSWLTQ

SEQ ID NO: 10903 - protein, 330 aa, Lawsonia intracellularis
MEQGLNVRCLHMISPFFGKPNKVQHWESLYNLTIETIDISEKYIEMLQQRPRYGFGKVLNPCIDCKMLMMNIAYNRMLELGASFIISGEVIGQRPMSQRKEALNLISNRVNIQNILLRPLCAQHLSPTDPEHSGLVDRTKLLAFFGRGRKEQLQLANSMGIQEIPTPAGGCKLAEKENARRYWLVLTKLKNPTVQDFNLANVGRQYWYNNYWLIIGRNKEDNQKLEVLASQNDTLITLKDIPGPTGLARNTTLWDSKILYEAASLVASYSQVAIKKEMPIELQLTSQTESICLTVIPSRTGLFTKECFQFEDVKQAIKNEFHPSIATAVS

SEQ ID NO: 10904 - protein, 179 aa, Lawsonia intracellularis
MKYSITPTCISFIGISDFKKDFIGKLFAQYINWAYLNTNHIIEAYYGMAIKDIIYNNKNESFLTIESNIISSLNIKRTIIFTGNTCSYKMETMQYLQHIGPVVYIYTPFLKILPYLNQLKRKDMLISPSITTNNFEAFFYERDTLYSYWSTHIINDNQPIQKIINILLNLFYNSQVKTN

SEQ ID NO: 10905 - protein, 180 aa, Lawsonia intracellularis
MAKKTIKEQRISKVIDALNYARSMELHAISQYMNQHYNLDNSDYGQFASNVKLIAIDEMRHAEMFAERIKELDGEPTSDLAEKVTKGQKVRIVFSYDTDLETKTIDEYNRLLNICRENGDSISAKLFENILEEEQSHLNYFSNTDGHIKTLGDTYLSKIAGTKLIEIPSKGFVSEESKAS

SEQ ID NO: 10906 - protein, 609 aa, Lawsonia intracellularis
MCGIIAYAGHRPAIPVIIEGLRHLEYRGYDSAGIGFIQGETLYHVKAKGKLNALEKKLSTYSPMLSTVGIGHTRWATHGSPSECNAHPHVNEECGIAIVHNGIIENFHELKHTLSEKQYQFKSETDTEVLTHLIAEGCKQYSSLIESFAWALRQAKGTYAVALISENNPSMVLAARMSAPLILGVGTGEYFIASDIPSFLNYTREVVFLEDNEIISITDNSWQVNDLFTLNPVKKSIQTISWDKHSAQKNGYKHFMLKEIFEQPQVIEECLSERINQETDHIYFPELDNLPIPTRIIVVACGSSYHAGIWGRNILERWAKIPTLPEIASEFRYQELITSPGELIIVISQSGETADTLAALKLAKEKGCKVIALCNVIGSTIAREADATIYTQAGPELSVASTKAVCSQMILLALLALYYSQRKKTLDIQLQQNILSDLKQLPQILQQSLPTIQDKANELAKCYSTSSSFFFLGRGEAYPLALEGALKLKELSYIHAEGYASGEMKHGPIALIDKNFPTVVIALYNNLFSKSQSNIAEIQARNGPVIILTNAPLHSNTYNENHLWTIPNAGFFTNFVTLSALQLFSYEMAGYLGKDVDQPRNLAKSVTVE

SEQ ID NO: 10907 - protein, 1000 aa, Lawsonia intracellularis
MSYCTNFYIIFSLLKLKRISITHIIYFFYTIVHLFLFIHPSYAIIDLGTLGGTNSQACAISPDGLTVVGFSNTYLGTKHAFKYKLGRMFDLGTLGGKNSTAIASCEFGSIIIGNSDIPGNNHNHAFVYTDHHGLYDLGTLGGKDSTAKAISHDGKVIIGSSMTENGDVQAFIQKMTTFFVNDQIFFTPQGNLINLGTLGGPFSYATDLSYDGRVIVGSSSTPLGEVHAFKHTPLLGMFDLGTLGGTFSIAESVSLDGDTIVGSSTTNQGTTHAFKYTPLLGMYDLGTLGGTYSKAIKVSGLGNVVIGESSICNGNIHAFKYSDSTGMVNLGTLGGNQSQAIGLSYYGTIVVGNAHTFQNKMHGFIHTDQTGILDIGTLGGEESFITGISLDGQIICGYSNTSNGAIHAFIHRTNIADIPPRPQSVIRLQQPLSSPDYTPPDSFSIITSNPSTPTSETSSLSNHTSPPSSPSTSTPLTSYCHHFPSSFYKLTNITPLSSNDTSMVMASPPASPSTSTPLTSYCRHFPSSFYKLTNITPLSSNDTSTVITSPPVHSSNKSYLSTPNSDNSLKNNDCLSPQSSANSSPICGPDSILQRLQAVATKLEIFQQQQQTSSSSNPDQIDGTLQHSSYVSSPQQPSRNSATYHSSNTESPDTSGNFTPPEEEEEEQQQIIQRLGATNPQLNQANSQVSTQTTSSSQQVTPETEVYIHHLFNPRKLVDVHNTSLALELDAAQLSNILANNYEEINQALNSDCNTFGPYGFCLNVGNRYLSTKDSKVSQSIGMVNVAFKFTPYLRIGLALDKALTKYNNQYKIKCSEPLTTLYCVYEQSTQSTGIKFKITGTQRISDVKIARILLPYTEEGKGHTKMKSFGFEAQAGYGFMLSSNWSLQPIVGVQHINITRKKYQEFPQVQFPITYNQAGIQITNVETAALLEGKVTNWFTIDFTGSIKHIIHQNNKSYTGTIPYLGEFKLPFNTKKKNTMLLELVQHFYLILNKLYVYK

SEQ ID NO: 10908 - protein, 135 aa, Lawsonia intracellularis
MSSQYFQQIMEDFFKELGIESYKQPELTYVLTAQDFGEIIIAEQPTQWVTLLAQIGEKPFDSSILWYQDILIENSLLDKATPKPSLGLIGKTLIQNAQLPLEYLTLQLLKQWIEFFLKIAVENQKRFIVNWKENV

SEQ ID NO: 10909 - protein, 385 aa, Lawsonia intracellularis
MYPITSPHNTSQVTYNIPNWTINNEETKLARLQNALEQKYHIGLSLMKTCFSRTPSLIVGSIVGAGVGSLSLPLSLPSATIAGGITTVGIHAYNTLKENNNSSKQIINLITSSIVYDIVHNNNKLQKVCLEPFSQIKGDFYRTLCRFSIDETEQASNGICHGLSFLWIREMIINANDPSSMKESLQQLKTINSFPPNEPNSITIHRELYTNDGFGYFKLLPECEACTPKFHFCREKETYGTIASEDRPEKNPITFGKTLIKSLLESELSFNQKYATITLSLSCSNWLEKHSCAVSIETPPLKNEEREDIDNSSQPVIINYFDPNYGQFQLKTSISEAPQTFSEFFQYFNSIAYPFVNKNYSCEIIFKPHKNAKNRIPQNALRLTL

SEQ ID NO: 10910 - protein, 199 aa, Lawsonia intracellularis
MKLFNNGPRVTFDENSNSGYSYPHEDDVTHEEERINTKYDPNAIPGKSILKQTTGDRGVRFDQSSNSTYVYSPGSDVRTTYDPDAVPGKSILKKTKSSFLSRMVTSIQSSLGRVGAAIIHGVQYVVNGVKGLCSYRTRQVQSEGSSLNPGEGQHHQPELKQEPIYVNYLDVSGTQQQSNKTSVQDNSKAHHPLPSIPQE

SEQ ID NO: 10911 - protein, 204 aa, Lawsonia intracellularis
MKIQFKHSSSHNSGVEENGNATGTSSSVKNKSLEPTKKESSILSKLRASWSNTLQRVKHSTMKMIGARTHQALKDYDAKKDTTGTSEGKKVSSTPRIVPRHENTSGPFTSNPVDSPDTIYATVVHPSTPLAQRPLPPIPENNPSSEPIYAELDFTLGPNSPGKMKPVIYENLKSVSPGPHVTEPIYAEIKTTSISTSGNKGKNN

SEQ ID NO: 10912 - protein, 371 aa, Lawsonia intracellularis
MAPAPGFGANNIQGQGDSRQLLEKVKDFLNLLVYQDKDKKPTQPQSGYNVIANQGSVKGLSYVIHGAIQEVQNSMRVLALNMNTARLTSEKPFRIFGSLSGQASSQRNSGASTQAGVMYAIPMFPKLWVGTAISQGRERKKEYQGVDIAKAYGGAKAKTETNQASVIAAWNVAEPGLMGYVEGTFGWGETKNTRVFTHAGERITTKGAAHTSTNGGIARVGYNIEITPMMMLTPYAEVSIATARWDSYKESGRILPAKISATREHVIEHRAGLKVDWHISDVCKIQAWGAAILGERNNTGVTAKPISLYSVSISSGKDKSRYKQLEVGSNIDFKITHNCGVGVNVGIRTKDGEKDKSIKPQCMGIHFWYDF

SEQ ID NO: 10913 - protein, 390 aa, Lawsonia intracellularis
VRAPFASASPSSLVSSSVISTATLSSVVSSSSVVKVTQEVDKPLTKSSSSKMSVKIDSTSNISTTTTTTTTTTTTQDSSIKQAPLVPQKPQRLSIPLTTSVKLTTSNNSDNDEDWGDDGWDAPHPESSAVEHGMKQDFLEQGQSLFSSVLNGTYSRNTISERGERDQSSASPSASSYQNGRLVDSSSSCPLSLHQEGEPGDSFDTAKAKLEVFMQKRHEPPQQPTKKPIGPRDEPNNAFKEAQSKLGAFFFKEEGWNAQSLKEPLKPTGRQSEDYKKNRAAMELLFAGVIAQHQDIQDYQRDRLSSPSSLSSSCLVENYEQGRQKWLKLKEDLEKGERVYEGMYGFFQISNQNEELRAKLFAIHKKNESLKSELESLGQELEDMWHRGLV

SEQ ID NO: 10914 - protein, 142 aa, Lawsonia intracellularis
LTTFYLLCLLCGKSKVFASDRESSDRQHVKQVKQPLHHSKHKSHQPSGKEIQKKVEKIEEAKKLLEDLRSQQVSTHETKEGLNASFQTVKQAQTVLGILESELKEMLGKYFSSVSSSERDEDLSSHTISKQKGKTDPHKIKK

SEQ ID NO: 10915 - protein, 477 aa, Lawsonia intracellularis
MIQTSPIPVNLSLPYKIADISLADFGKKEMQLSEREMPGLMTLIQRYKEKKPLKGLKITGSLHMTIQTALLIKTLYYLGANIRWASCNIFSTQDHAAAAIADLNYASVFAWKGETLEEYWWCIEMALTWPDGSGPDLIIDDGGDATLIIHKGVEIEKNPELLKQSHSDKEIKIIMDRLKVMYNTSPTHWTKIAKNIRGVSEETTTGVHRLYQLAEENKLLFPAINVNDSVTKSKFDNLYGCRESLADGIKRATDIMIAGKVVVIAGYGDVGKGCAQSMRGFGARVIITEIDPICALQAAMEGFEVMTMEQAAAEGDIFVTATGNLHVITHNHMNKMKDEAIICNIGHFDNEIEMSWLENNSECKKVNIKPQVDKWVLPNGRSMIVLAEGRLVNLGCATGHSSFVMSTSFTNQVLAQLELAHNKLENKVYILPKKLDEEVARLHLERLGVTLTTLTQEQADYIDVPIEGPYKSEHYRY

SEQ ID NO: 10916 - protein, 302 aa, Lawsonia intracellularis
MRVAIISSSFARYDKKPLELLSQAGIEYILNEQGYHLTDEELIQIIDGCAGIIVGSEPLPKKVLETNPRLKTIACCGKHLDNIDVEYAQEKNIIIYNPPKGYAIAVAEFTVGLILSLIRQIPYQDKEVRSGVWHKRIGNLLHGKRVGIIGLGQVGKAVAERLLPFGVDIAYNDPNVYSTTFQKFDLDKLIDWSNIITIHCSKPIKAGPILDLGRLSLMQPGSYIINVAHGGLIDEKALCGLLTAGHLAGAALDVFGKEPYDGLLKNINNTILTPHIGAYAKESKIIMETDAVTNIIDTLKNS

SEQ ID NO: 10917 - protein, 711 aa, Lawsonia intracellularis
MFDTSTLNSAQLEAVTAPDGPVLVIAGAGSGKTRTIIYRLAWLAEQGIPPSSMLLLTFTRKASQEMLHRATMLLNYSLGDVNGGTFHSIAFSTLRQYKPSWATGKVTIIDAQDTLTSLQHCKEELKIAKGDRSFPKLQTVAALLSRARNKEITFKELIQKDSPHLISHIDSLTTLVERYTTYKKQQNLLDYDDLLFEFELLLKGDESKNIPPLAPLFQERYQYIMVDEYQDTNRVQARLVRLLSGNTNNTMAVGDDAQSIYAFRGATVNNILEFPNLFPGTKIIRLEENYRSTQPILDTANAILKESQEGFHKHLFTNRIGGEKVRLIRSLSDLTQANLIANRIKELLSIYPPKEIAILFRAGYQSYHLEIALAKHTIRFRKYGGLKYTEAAHIKDMMAFIRLIVNPLDMPSFLRIAAFSKGVGPKTAQKIYQIAAQGNFLELQKVCNKYPDLLSDMTLLDEIRQQPLEPTEILTKVFEHYQPKLIVHFPEDWPRRQQGLEELIHIASAYTDLEQFIADLSLETPEEELNEEESIVLSTIHSAKGLEWDAVIILDLVEDRFPSRHSLIRSEDFEEERRLMYVACTRAKKQLELSVPTTLYNKQYGCNEPAIPSPFVQQLPSIVIEEWQEGYSGNIYKKITIPTNQPDSKTCSQIPASNNTYNKEELSYSFCRHKIFGRGKIIEYLLPDKCRVNFPGFGLKVILKDYLTIED

SEQ ID NO: 10918 - protein, 340 aa, Lawsonia intracellularis
MNQYSSLVSEEHILSCINKYFPDQSHFITAGRGDDCAILSVTSPLCISTDMFIENIHFRHSYFSPEDIGWKALAVNLSDIAACGAQPIGFTVGLALPLNTSIDILEGIYSGMSRLAKQFNLPLLGGDLSQASELSICITILGETHAPLLRAQAQPGDIIFIIGQVGLAHTGLQLLEQQGTKAIELYPKSCMAHLRPFPLIHEGLALSKMAKSWSQQTNTPHRLALIDNSDGLAQDIPRLLGKGKGADITIPALDHEIIQFIESHYTENEYSPDLHAVIGGEDYSLIGTCSPNFGAKLNMVISNLTIIGSVTDSEPILFNGQQMQGFDHFRGNYINPSNKL

SEQ ID NO: 10919 - protein, 454 aa, Lawsonia intracellularis
MGTSNVFRAYDIRGIVDVDFDLDWVEKLGKVIGTYFVSQGISSAVVGYDCRKSSVDYNNALVKGLLSTGVDVISIGMIPTPVLYFAVKYLNRHGGVMITASHNPSQYNGFKIWAGESTIYGDEIQSIHKLFEVGSFASGQGVLSFHDIIPSYMAAVEAWCKLLRPVKVVVDGGNGVGGTICADILKRIGAEVTCLYCEPDGNFPHHHPDPVVEENMKDLANKVKAEHADLGIGLDGDADRLGIIDSNGRLLFGDELLSIYARELLVHKPGSIVIGDVKCSNRLFDDIQKHGGNPVMSATGHSIIKARMRELNAPLAGEMSGHMFFSDGWYGFDDAIYGAARLVSLFSAQEKPMSELPGWPPSFATREINIPCKDTIKFAVVEKVKNYFKSQYETIEIDGARINFPYGWGLVRASNTQPVLVTRFEADTEEHLMSIRKEVETPLMQWINEAKENV

SEQ ID NO: 10920 - protein, 383 aa, Lawsonia intracellularis
LLSIMNWDWEKLQEKRQRQNWGQGRTPKDSGNNTPPPNGSDPNPEQLFGNFFKQFRLKPNSGKVKWIILILISLWLLSGIYIVNPDEQGVVLQFGKYNRTVDAGPHYALPYPIETVYKPKVTQVRRVEVGFRSTSLGGTFQQGATRTLPEEASMLTGDENIVNVQFSVQYQINNPVEYLFNVTNPTAVIKSAAEAAMREVIGNSMIDSALTDGKLQIQNEATELLQEILDRYKVGIHVLAVQLQDVHPPKEVSDSFKDVASAREDKSRIINEAEAYRNELIPKARGLATEIENKAQAYKETRIRNAKGETAKFQALLLEYNQAKEITKKRMYLEAMEGILSQPGIEKIILDNKVAGKALPLLPLSQKGLSEYSVPKDKIKENK

SEQ ID NO: 10921 - protein, 283 aa, Lawsonia intracellularis
MQHKISILVSVLVIILIISSQSIFIVNETEKALVLQLGDPVDRIFGPGLHFKIPFIQKVIFFDARILDYDARAAEALTSDKKTIVLDNYARWRIVNPLEFYRTVRTIPGAQARLDDVVYSQLRAQVGSHTLTEVVSQNRSNIMSDVTRRTSDIMKEYGIEVIDVRIKRTDLPSENQRAIFGRMRAERERQAKQYRSEGVEESTKLRSQADKEQAIILAEANRKASIIQGEGDAIATKIYADTFQKSPEFYEFQRGLEALRNGLKENTHMVITNDDLFFRPIQK

SEQ ID NO: 10922 - protein, 253 aa, Lawsonia intracellularis
MMIYSFAPFKNNMRQTLRENAMTFFQEVYDRVRFATNTKTQAELANILEIRQSSISDAKRRDSVPPEWYIKLFEKFGLNPDWIKQGVGPMYLRTEQGYIPRELPLTGVQETPMHYGDPISKSVLHTVFSMRCNYIENSNSLPILQPTGKIALPQPYTGANILVFQTESDAFLPLVRRYTYLGINTDFTHPQSGEIYAVFMPYEGIALKRLFLSTQKNGFCLCTDQNDSHESFLPAQECPIRILGRLAWVFQTF

SEQ ID NO: 10923 - protein, 440 aa, Lawsonia intracellularis
MNSHSPSLRCHAISLGCPKNRVDTERLLGSLGIPLTFIDYPNNADFVFINTCSFIHTAVQESVNTILQLVADVEELSEKPFIIVAGCFVGRYGEKILKKDIPEVDLWLDNKEIESWNEQILLALNIKSTFLVTDRIITTGKSYAWLKISDGCQHSCSFCTIPSIRGSLHSYSIDELVKESRHILDQGVKELVLVAQDVTAWGRDLPNNYGLKTLLDHLLVLDGLKRLRLMYLYPTGLTKDFLLYLKSVGEPFVPYFDVPIQHAHPDILSCMGRPFAKNPRKVIDNIRSVFPEAVLRTSVITGFPGETEGHHVYLSKFIEEIKFQHLGIFSYVAEAGTPAAVMPNQVGEKVKEQRKAELMEIQLKISEKWLKNFVGKRLSLIVDNVHPEWPELYTGRAWFQAPEVDGMVYISGPNIKPGELIEADIMESHSYDLVALADSY

SEQ ID NO: 10924 - protein, 249 aa, Lawsonia intracellularis
MLRSLYGDKNYLIYLANDIKGISMDSSFNLQAPDIKTTEKNNAIPTVILATRNTGKIQELKDMLCNFKLHILCLEDFPEIPEIEETGKTFEENALIKAKVVSQYTGLIAIADDSGLEVDILNGAPGIYSSRYAEDIPNIHNLTIDQHNISKLLSILTNVPLTQRTAKLCTTIVAYNTNGKYITAKGITKGLISLTSKGNNGFGYDPIFFDTNLGKTFGELPLKEKKQYSHRTKALKKLLELWPTLYNEI

SEQ ID NO: 10925 - protein, 358 aa, Lawsonia intracellularis
MINLLNITYPEFESLIVTTLQEKTYRAMQIWQWVWQKQITDIESMTNLPQKIRASLTALIKINLPEIVTIQQSSDGTKKFLLRLSDGALIETVLIPSIDKAGNIRITQCLSSQVGCSMGCTFCSTATMGFIRNLTAGEIVSQVLLAKLHLNDNKPDKPIIRNIVFMGMGEPLLNLTELTRALHILHSEKGLNFSARRITVSTCGIKKGIQALSENGLAFLALSLHASNQELRSTIMPKAAKWDLKELIDTLKNYSLKKREKITFEYLLLGGINDSPEHAKELAKLITDIKGKLNLIPYNPAQGQPYLKPTEENILKFQKVLWSKGIVTILRKSKGQDINAACGQLKTTYLSQSSSTIY

SEQ ID NO: 10926 - protein, 439 aa, Lawsonia intracellularis
VNSFDVFSKGYTFLWRLARPFLQQHKRLHENFSQRLVPTNWAEPATIWIQSSSGGEAYLVRSLLEHLPIQDSTLHILLTTWTPQGRIILEETKSILESSRSDLSIQVQYVPLDEPALMEKALIQVSPQLVVLIEAEIWPGLLFACNKRNIPVLVLNGRVREKSLRGYDWFSWFFPEFWRAIAPKYVAAISSADAARFTALFGEYCVGVVPNIKFDRAICTLSQSDSSKNVLTEILPDKPIILLASVREEEEALLVPVIKKLYSRHGKDTCIIVAPRHESRVKEWIKKLNFVGITTQLRSVLTPYKEELYQTSIPVIIWDTFGELDKLYNLAQAVFVGGSLVPLGGQNFLEPLSVGKIPCVGKYLDNFSWVFEPLNVEHEDFSFFIRICHTPFELIEQLERQLQHPEPKEEIISRFNTWLESRKGGADKCASLIISMLEQ

SEQ ID NO: 10927 - protein, 302 aa, Lawsonia intracellularis
MNILLLAGGWSSEREVSLQSAELITSAMIEYGHTVTCLDPLYDFDKIVEVAEKQDVAFILLHGSPGEDGILQALLERVGCPYQGASPAGSLLALHKAAAKALFRREGLLTPKSVFLPLKPEVTWEPGLNYPIFVKSNIGGSSVNVHLVTNYEELFIAMEALFNAGEEVLLEEAIIGQEVTCGVIDDQALPPILIRSQGKFFDYYNKYAKNGAEEICPAPLEPHVLKHIQEYALRAHNTLNLQGCSRADFILRDDELLFLLEVNTIPGMSATSLVPREAAAMGLTFPELVEKLIQLAIRDHRK

SEQ ID NO: 10928 - protein, 213 aa, Lawsonia intracellularis
LCQTVENLKYMINSNVIPTLYYDIDSNFVPSDKDCITLWDKYGVFDNIRQHSVVVANFAEALAKQAVKVGYTNYIKSCRAGGLLHDIAKSYTVHYGGSHAQLGASWVISSTGNYRLGQVVLNHVEWKWSLPKCLIHPLFIVMYSDKRVQHNIPVSLENRYTDLILRYGKTEDSRKAIYRSWEHLKNIERVLSTQLELPLYEYTLIGRRLVFRA

SEQ ID NO: 10929 - protein, 150 aa, Lawsonia intracellularis
MKIRQYKSIDLEQITRLFYETVHAVNIKDYTEQQLNVWATGNINFKKWDTSFLKHLTYAAIEKDLIIGFGDIDETGYLDRLFVHKDFQGRGVATALCNRLENEVGTKCIIVYASITAKSFFENWGYKIIRLQEVEKQGVFFKNYIMRKEL

SEQ ID NO: 10930 - protein, 374 aa, Lawsonia intracellularis
MVHRDYYEVLGVSRNASQEEIKKAYRKLALQNHPDHNPNNPEAEQRFKEAAEVYEVLRDPEQRARYDQFGAAGLGGSFSGFSSAEDIFSHFGDIFGDFFGFSMGGSRRKNTPRATAGSDLLYKLTVSFEQAVKGSDISITIPKDVSCEDCGGSGAAPGTLPETCKECNGSGQVRNSQGFFQFIIPCPVCHGEGSTIPHLCPRCKGKGVTQQSKELTVHIPAGIASGTRLRLRGEGEPGTHGGPSGDLHIAVTVEDSKIYQRQGQDLFYYCDISFPQASLGCTLSIPGLDDETLELKVPKGTQSGSVLRIPNKGLPYVGQKRHGDLLVKISVVTPTKLTERQQELLMEFQAITEGRPIEKVKKVARKLGQAIGMK

SEQ ID NO: 10931 - protein, 511 aa, Lawsonia intracellularis
LYKETFMEVRFQIGVSSWSTDAIIIPFFEDEIFKEAYAELLNVLPWLEVAPALEDVKGKKGEVVVVYGPLSTTIPRVVIVGLGKRKKITPIKLLENLRNTIGKASSYCRELGLKNFSILVRSFERFDYNLERIIEEVICAIGLALYRFVDCKSQEDLKELPEDPQWIGVLFRDTVADETICNAARRGEVHATAVNLARTLDNTPANIMTPIQMSKKSIEIAKKYNMKCEVMDRASIISAGMGAFASVAEGSSQEPQFIILEYAPLGHENDDPLVFVGKGITFDTGGISIKPSAKMEEMKCDMSGAGAILGLFEALGQLKPQVKVIGLLACAENMPDGKATRPGDVVVTLSHKTVEIVNTDAEGRLVLCDAMTYAQKHWTPAVLIDIATLTGACVVALGDDIAGVFCDEIELVNKIRNIGELVGESYWSLPLDDRFFESLKSDFADFKNVGGREGGASTAAVFLKQFVKEDTKWAHLDIAGPSFTSKKKDLCPTGGTGFSVRTLIEFVMDYS

SEQ ID NO: 10932 - protein, 465 aa, Lawsonia intracellularis
MSARILIIDDEDSIRFSLKGIFEDEGHEVLERASAEEGLKCVDVESPDLVFLDIWLPGMDGLMALDHIQALHQELPVIMISGHATIETAVTAIRQGAYDFIEKPLSLEKVLITANRAIETVRLRRENKLLRTVLPEESEFIGQSPVILKFKSLLSQVAPTDAWVLLTGENGTGKELAAQALHKGSSRYQKPFIAVNCAAIPEELIESELFGHEKGAFTGADASRAGRFELAHKGTLFLDEIGDMSLKTQAKILRILQEQCFEKIGSVRTIKVDVRVIAATNKNLEDAISDGTFRQDLYYRLRVVPLHLPPLRERDSDIELLLNRFVIQLSKRYRREPPIFLDEVFPVLKQYCWPGNVRELLNFVERMVILYSGKKVCLTDLPQEMHTKRSIDPSKKQFNISQEISSIITSSDIDFKQAKIAFETKFLTEKLHAYQGNITRLAEAIGLERSYLYRKLKSYGIYLSE

SEQ ID NO: 10933 - protein, 601 aa, Lawsonia intracellularis
MQKVCYFFLITFFYFFITENYLFATSITTSTINQQHIAYTVTFTSPENPNLATEMETHSELVKLANQSLDSKIGLNLRVKEDISTAQKILDSNGYYSGSVEGKIDWQTNPISIQIQFKPNVQYKINTIHIQYLDSELAYLPLSLEEFNLSKGNPALAVNILSSVSSLMQYIHNNGYPLAKIKKTQYIINRMDYTFDIDLVIRQGPLLHMGKVQPQHNLNISTIFLNKIATWKEGRVWNNALLDSYRTRLQQTGLFSSITLNPRNQKEQNGNTSIELVATEAPPRTISGGLQYSSDQGIGARGTWEHRNVFGNGELFRITAPISRDDQKIMANFQKPAFGRPNQSLISEAQLKKENTKSYKQQLASIALGIERQFNRRWFGSSSLSVDTGFMDDRDSIKKIFTLFGIPLSITRDSSKDPLNPIQGTKATLNVTPYIGKYKKKILTLRSRFDFSFYIDVLKTGKLILANKIAIGSLLGKDIENYPAILRFYAGGGGSVRGYDYQSLGPKNKYGDAIGGLSFSTISFELRLKITESIGIVPFIDGGNIYEKKFPDFKKSIYWGVGLGLRYYTSFAPIRLDIATPLQDRSHNKHFQLYISIGQAF

SEQ ID NO: 10934 - protein, 1382 aa, Lawsonia intracellularis
MNNTKILSKLLYTLLGAFTLFLGLIITGILFIRTSTGIAWIKNTVSSLLQQQGIILQVSSIIGPFPEQITINELSLSDVNGTYLTISNLEIQSNLWALFKGQLEILSFELNDLVLYRLPSNNNLKKSSTSFVLPHISFDLTPWWTEHIRIQNIHINNTQLSSDIIGIPLVLSLEGDGTLTNWNGTFQLSSSNKTKIIGTLRYQGNKTQFFEYVHPTRIVTLEIDSVADKKSYNNSILEQPLHLHLSIYPEHNRIILHSLLAEYGSWLLTSESIEVSNEQLKGNILLKYNGEATHQLPIKKLNSSITLSGSLNKPNFSIQMTLPEINITKNIIDLQTELVINLGLFSTHSDILTSGTITVQGETIPNSILSSAVDIIASTTTHTITLEHATLTSPEMHFSLSGEFNSLLGNIDANLKGNTPTLSIFSSLLGLPDLTGQSNITIGLHRQGSSSSIEGTATVSLNNMNWGVQALQGTLGDNATLSGIYNLTPIDWSISLNKLKLTAKNVYAEGLINFQKKYIDSSINLIIPNLQLIAPPISGELQSLITVSGKLDAPSIESKIFSSQLTWNALQLNNPQLIITTTQSSSSAIKGNITLSAEPASSEALTFSSNWGILPTEILVEKIIGNILGVNLDGNIKITKKDYLINGDIIAEVQSWKDIANILQIPIRGSASIKIQFDPKNQQCISTQWQLKNFILGNNFNVTTIKGRADTIQLHKNPTIALSSKIGAGTYEDFQWTQGTLDIKGTLKNFNSKINIAGQTTVNANFQTNLFEKNINITTLNLKNIQKNIGIKLLQPIKIIVSPQQFVLNNCSLAILPSGTITTDIYVTPQRLNANAIIKEVSLLSFQPFSILLPQGNINGHITLTGIPSKPKGTLSFDILNIHYPRPNPSIANLHVEGEIISSPNNICKLNATLTEKKEPIPISIQATLPFEFTENNIPMLSKMRPFSAHIKWTGILDTLWKLIPLTDYIMAGNGSLDASLSGTLDSPTYAIITTLSNANFQDLSLGLYLENINAKLQVFSNRISHIQATASDGKQGSIQLIGNIGSSKEHFPLSINGSFTNLAPLQRKDLSLTLSGAATLEGTLKQSEVKGDIVINQGEFQLTEGLTSNIPTLNVVDSTQQQNTKTKKATYQQPTLSIALSIPNRFFVRSSMFESEWGGNLTINKVITSPVITGALTSIRGNFNLLGKQFSLAKSTISFSGSVPPNPLLNISLTYSSPSITAIGIIKGTTSNPNITFSSTPPLPQDEIVSQVLFGKSSQSLSRIQAIQLAQELANLTGFNTGSMNFLTNIRQTLGLDILSLGTTSNRKANTSNSNDQIEDIPVIELGKYITDTVYVGVEQSYLDSNDTGARISVELAPNFNLEGRTGTQYSEIGINWKKDY

SEQ ID NO: 10935 - protein, 172 aa, Lawsonia intracellularis
MNGILKKYFIMFVMVGLICINTTLVDAKRLSPCPGGDNNGKSGSGVYQYLTPEMQTKCDTIVKEFAKKTQELREKILAKRLELQAMAQSSKPDRSVIQELSREIAKMHTELSSEYEKMYEKLSSEVGIRGHYIYGSGLMHRHGMGYYGMGGYNNMEPDSGAPMTPLKSGRGK

SEQ ID NO: 10936 - protein, 162 aa, Lawsonia intracellularis
MEVFRRYGIVLVLLVVLSAGFGCCKKSVDVEQSLATECIAPAPAINAAAETITDGIIYFDFDKYDIKPEYRDMLQKKAELLKEYPCIRVRIEGNCDARGTQEYNLALGERRARAAYEYLVMLGVNPSQLEIISFGKERPAVEGTGPAVWAKNRRDDFRIIAK

SEQ ID NO: 10937 - protein, 452 aa, Lawsonia intracellularis
LVFIIMSRGNTYRSLGILIILLLVCLCHPALSAMQIDIYGPGQNIVHVAMARPIISPGVLATDLGIDLDRAIRNNLSYLPFMRLTDEKAILNGSSLEGYQPPNIDFKRFQLAGSDLLITVGWPKGDHSDSSVELRLYETYSGKFVFGTAYSGVVKSEISNIADKFCADLMKTLTGSGDFFLSTLAFVKQGNGKNVRDVWLVKPTGKELRQITDISGTAMSPSWSIDGRFIVFTHLDDRSHALGVWDRLTNKIQRIRFPGNTVIGPVFMPDNKVAVSLSTGKYPDIFLLDHTFQKEKVLEESPAINVSPSFDAKGTKMAFCSNRLSNPQIFMKDFSSGQVSRVSRQGCYNTEPTMSPDGTLIAFSRLTDDGNRIFVQDLLTGIERQVTFGPGNDEQPSFAPDSYFIAFTSTRSGKKQIYLITRHGGDAKQIPTGHGDASFPRWGKITVANKAR

SEQ ID NO: 10938 - protein, 317 aa, Lawsonia intracellularis
MRFISYIASLILHIGLILIIVFWPTKTIVRPERPIQISLTMESIGGGRLPSPVLGQQIPVPTKTSTVTPSIPIENIPVLKNPSVQTSSDFVPLRQETIGGHESQNQLQPIAVPVREEIAVNERIEQKIPTEKILDTPKAKQELAKKVEKMQPKGEPAKKIVKKTEPIGGSASLKDALLDAKKKTNIQKSQKVSPNTSVTNALAGFKKQTSTVGGGGGVSDGNGGGGGLHDIYAGLVMMSVRPNWSIPTYSRDNLVALVHVRIDADGNVLSCVIERSSGRSDFDASAVNAVIRTKILPPPPTPAQQDMIIVFNSLEVQ

SEQ ID NO: 10939 - protein, 144 aa, Lawsonia intracellularis
MGASLGGKSSFVSEINVTPFVDVMLVLLIIFMVTAPMMTEGLEVDLPQTRAVETLPLESENLILTIRRDGNMYLDTYPVSMDELQEKLDLLVRSQNKELLLQADKEIPYGVVVEVMGRVREAGIDKLGMIATREEIGSGVTSKK

SEQ ID NO: 10940 - protein, 225 aa, Lawsonia intracellularis
VNRMDLSIISLIAQATVVGQVVLLILLLMSVLSWAMMFQKWIAIRLAMKKTVLGSERFHDARELRNAVHSIGRDMVSPLYVVAHEGVTEFNRSKEAGNSEEVIVENVRRALRQGVSTEMTRLSSSLSFLATTANTAPFIGLFGTIWGIMHTFHSIGAMKSASLATVAPGISEALIATAFGLAVAIPATVGYNIFVGKLGDLESKLVNFAGMFLNRVHRELNANKT

SEQ ID NO: 10941 - protein, 191 aa, Lawsonia intracellularis
MKSLKGTRTEKNILTAFAGESQARNRYDYFCVTAREEGLMQISEIFAETALQEKAHAKRLFKFLEGGEVEIQAAYPAGVISTTENNLLAAAHGEHYESTEMYPQFAQIADQEGFCEIACVMRNIAEAEAYHEKRYLAFAKNLKEGKVFEREVAISWRCLKCGYIHHGKNAPEVCPACGHPKAYFEVLHNPW

SEQ ID NO: 10942 - protein, 67 aa, Lawsonia intracellularis
MSESPIMTEPKEMWHCQITNCGYIYNPERGDKRAKIPPGTEFESLPDNWHCPVCGASKKSFKPLTDS

SEQ ID NO: 10943 - protein, 342 aa, Lawsonia intracellularis
MKNIAVWNTAFLGDTVLTLPLIQTLAKTYPEASIDFYVRKGNGSLFSSHPNIKNIIEYNKKQQFIKSTIKLIQHIKKQNYDLWINAHTSIRSSIITLCSNAKLRIGYSENIIQPLCCTQLIKRKLGSLDEIERLLDLLSNLPIKKSNIQYWPNIVLTQDAQQQANTFWRKYILGPVLGINPGSVWPTKRWLPERFAAILHRAIKKNIHVLLFGGPGEEQLASEIISLSGMTGHPLLHNLCGTLTLQELAAFIKKLNCYLTNDSGPMHIAWSQHTPVTAIFGPTVKCLGFSPRGEHSTVIEISLYCRPCSLHGGKTCPEKHFRCMKDITIDVVWENIEKKLFL

SEQ ID NO: 10944 - protein, 336 aa, Lawsonia intracellularis
MATFFFFPPLPSITGGMYVILTIAKHLHTIGHKSTLVFREYSPYIDSITPQIPTTHWDKLTLSKDDVWVVPEGWPMALIPGLRSQSRCVVYVQNWAYLHGKLPDNASWEQLPVTMIAVSNPVAFFIKETTGINAHILRPGINLNIFHVPTCKSFKSQNRPIRIAWMPRKNKALAHQIQQSIKAKLSSCNSSTSLEWIEIHKKTPEEVSACLKTSDIFLATGFPEGCPLPPLEALACGCLVVGFGGFGGWDYMRQALPNGYTPWWPLENLPWGGNGLYVADADILGTIFALEYAIDLLHSHNEELNSIYLQAEKTVKEYSLNNHYNAVSNLWEQHFI

SEQ ID NO: 10945 - protein, 195 aa, Lawsonia intracellularis
MEEIMSSQNQLDYEINKELGECYLFMGDFDKAEDYYKKANTSMETQPEPYMGLATIAIQRGDFDTAMDFYNKAFDFGLQDKALAGMGLIKMELGEDEEAFSYFEKAAHANPANAVALNCLVREGYKLNRLESVVSVLEECVNIFPDREELRISLAGCLISLGRNKEAIKQIETVLEYNPSSIVAREFFNHIMLAA

SEQ ID NO: 10946 - protein, 621 aa, Lawsonia intracellularis
MERPHPSSIPTTPGVYLYKDSQGRIIYVGKARNLRKRVLSYFRDGLVITPKTKAMMNHANLLETISTNTEKEALLLEASLIKKHRPRYNIVLRDDKQYLLFRIQKGIPFPRLEIVRQSYKDNAVYFGPFTSGTSVRDTWKFIHKIFPLRRCSDKVFNNRIRPCLYFYLQQCLAPCTEEVDPKDYAVLIQKVELFLSGKSKELVELLQKDMLYASEALEFEKAATLRDQIQAIKHTIERQSVVLPEGGDMDVIGIAVVNNGLALGFLFVREGKLLDGRTFFWPGLELDDGPELLGSFLSQFYSPISSIPPRIIVPWLPESTNNKDEISEDTFETLKYVLEDIRNSTVRIEVPKNIIESNLVDIAVTNAREAVQTKLGEPMSAKLAKVFHTDKPIFRIECVDVSHISGTNTRVGMVVFEDSQPLKNDYRIYSTTEDNSPFIKGDDYAALASWAKRRIQSGPPWADLVLIDGGKGQINAVQRVFNEHHLKDVFILAGIAKARNEEGRVDRRAGNIGDKIFVVGRMNPLTLKEGSPELLFLQYVRDTAHNFVLGKHRKARKNTALLGELLRIPGIGQATAKLLWSHFKTVEAMTCATIKDLEAIPGIGEAKARMLAERLQSLRNQ

SEQ ID NO: 10947 - protein, 231 aa, Lawsonia intracellularis
MTQQRVSSVFIETVPIVLASASPRRRSLLEQLGLLFKIVSVDSEPLPLSSEHPLEYVIRAAKVKAFAAAALEPRSVIIAADTVVIYTKDDVFEIIGKPQSGNDSFSMLSRFQGGKHQVITGCCIVWPLEENITSVQYEIFYDTASIQFGQWDKDILSSYVSTGESNDKAGAFSIQGIGAFLIDIIEGNYTTILGLPLPQLVKRLLKRKAIKVVLNKNSEETISSDFLTYSR

SEQ ID NO: 10948 - protein, 359 aa, Lawsonia intracellularis
MPIYRKVGARLTQMQELFSRNDNWLIIINADPDAIASAMALKRIMSRRTGKVFIARINEITRPDNLTMLRQLYIPLVPWSETLLPFFQKFALVDSQPHHSPIFQDIPFSIVIDHHPILPEFPSKATYSDIRPEYGATSTIFTEYLRSLHIRPGRRLATALQYGIRTDTGTFTRKFTDADIRAYQWLAKHASNTLLIRITRSEYLQDWLKYFTRAFTSLHDCGKGKFAFLGNIENPDILVVVGDFFTKVYGLKWTAICGVYKEQVVIVFRGDESIDLGKFASERFSSLGSAGGHRAMARAEFPLKLVEGKNLEVFIFRKLSERLHSKKKNSKKESENNEELSTKEEHKHPSEPLNTNQTS

SEQ ID NO: 10949 - protein, 455 aa, Lawsonia intracellularis
MLPSTIVEILCSKTAQADVHVGGWIRTRRNAKGFVFLELNDGSCLKNIQCIINEGSAAWDMLDGVNTGACVSVYGKLVPSPGRGQDWEIQVEKMVVHGLAAPEVFPLQKKRHSDEFLRTIAHLRVRTNKYGAIFRIRAEAAQAIHNYFYKKGFYYIHTPILTGSDCEGAGEMFRVTTAHSSNDSQSSDNFFGKECSLTVSGQLEAECLAMGLGKVYTFGPTFRAENSNTPRHAAEFWMVEPEMAFADLQDNMNLAEELTCEVIRKVLQCHIDDIMLLDKYVQPGLIKALENIIAKPFIRCSYHDAITILLSSHKDFEFPVTFGLDLQSEHEKYLTEEYFKHPVIIFDYPKEIKAFYMRQNDDEETVAAMDLLVPRIGELIGGSQREERLDNLLSRIRELGQSIEEYWWYLDLRRFGTVPHAGFGLGFERLVMLLTGVSNIRDVLPFPRTPGYLEF

SEQ ID NO: 10950 - protein, 229 aa, Lawsonia intracellularis
MLVESDLVIQRRVMDSSLLGQFFSFILHIDTHLFPLVAEYGIFLYVILFIIVFCETGLVITPFLPGDSLLFAAGTVVGAGYLYYPILVIVLLTAAIMGDAVNYMIGNYIGPNVFSRNIWLLNKDQLIKAHNFYEKHGGKAVIFARFIPIIRTVVPFVAGVTYMNPSRFLFYNIVGAAIWVIGLVSAGYLLGNMPLIKKNFSLVIYGIIIVSLLPIIIEWVRLGVRRKRI

SEQ ID NO: 10951 - protein, 1102 aa, Lawsonia intracellularis
MSIFCADLHIHSRFSRATSKKLTAPHLAAWSRIKGISVIATGDITHPVWREELQQQLILDEASGLYKLPVSKEVLQSEVPGIEIPSDSPDPLFLLQGEISSIYKKDGLVRKVHNMIFMPDFDSIEKLCRKLESIGNLRSDGRPILGLDCRNLLEIVLEVDERGTVVPAHIWTPWFSLFGSKSGFNSLDECFGDLAPHIFALETGLSSDPEMNRLWSHLDGCALISNSDAHSGDKIGREANLFEGLPSYDGIFNALRFSTGRFPSIPNNVQYKGTVEFFPDEGKYYLDGHRACGVVVEPKEAMRMGNMCPVCGNELTIGVLHRILELADRTEAYMPATPPYYPFIPLVELLGEILGVGSMSKRVLDKYGQLIHRFGTEFNILHVVSERDLRQYWNELGEAIVRMRRGQVIRQGGYDGEYGIIRVFSDAERASFLPGKMFSRSSKPRVTTQEKSKTIKNLSPKYMTMPLLAATGVLLEGEKETSSPKSSSVTAASYGDIFLTKKDHDKKIITTTSSSSNFSYSTSQNEAIKADIQPILVLAGPGAGKTRTLIGRIEHLLFSGIKPSEILAVTFSRRAAEELQERIRNSIGKGTIRVDTLHALALGYWPKKEDGSQPHVLSEEASQAVFIKANEENEPKLIKKAWEILNLVREKQVDTSVLPEQAYLPMLEKYRQYKKIRNMVDYSDLLEQWISTLQKSRGTFWKAVLVDEIQDLSSLQLALVKLLVPSSGKGFFGIGDPDQSIYGFRGAHPNVQLALSKMWPGIKVITLAENYRSVKEVVYSASALLASGKQSKNLTSTRKDKGLLHLFTAPDYCREASWVASKVSQLIGGSSHTLVDARAGNEPHPLAGLCSPGDIAILVRMKALMKPFQESLVRLGVPCSVPETELFWEDQRVALLLGLAGRKFGRPFGIQTVPDPSSIATHIWNGGPSALLSWLESVPPFDPLFRESSSFKKLLKAYKVHGSWESLLNWLCLRQEIDLVKSHSEQVQIMTLHASKGLEFKVIFLPALEEGLLPYLGTQRLLQKAEKEYENSETIAEEKRLLYVGMTRAKDALFLSYSEQRTIFGNVLRLAPSRFLVNLPDMFQRSQLMKHIQKKPSQLSLF

SEQ ID NO: 10952 - protein, 796 aa, Lawsonia intracellularis
MGVLNRLYNMQLKRQGYTIKGRVQGVGFRPFVYCTATKLGLTGKVKNTIYGVWIEVQGDDSKLNIFKEMITNEKPSIAQFTSITMQSLGFQDKETEFLIEESSDGIQYTSLISPDIATCEYCVKELNTTTDHRYQYPFISCTLCGPRYTIIHKAPYDRHHTSMSSFPFCFTCEKEYNNSLDRRFHAQSNACPTCGPQLWLTDHDNRYITYNSEAILLAIEYIYKGKIIAMKGIGGFHLICDATNADVVNTLRYRKNRPDKPLAVMVPNINIARQIAYISEVEIQKMQSPECPIVILKAIPHSLPKNIAPDVSTIGLMLPYTPLHHILCNTLTKVAELERIIPALVMTSANVSGGTIIYNNDDALIRLNTITDFFLFHNRNIIVPVDDSVVCLREDNIGQSPNWHFIRRARGYAPLPITVKTLKDNTPCIIALGAEHKSTFCFTRGQDIFLSQHIGDLSEPETEWSFCQTVKHISQLFGFSPEVVVCDLHPDYFTTRYAAEFGLPILQLQHHIAHGYSVLAEHGHKEPALVLTLDGTGYGMDGTIWGGELFYLYPEAVKGKSYEQGERLARLSLLPLPGGEKAIHEPWRLLSGFLALLKIHELEGVDSLVRQLWKNSPERWTIHSAIREMVSKDKVKLTSSCGRLFDTVSTLFGLCDYITYEGQAAIRLEHQQDMSCNESLTISIVEKDSIYELDTTVFLKELIELLQQKISVSILARRFHIGLVEGLADLALIGSENTGVKTVGLSGGVLNNQTISSLLPKALRYRGLTPLMHKNVPSGDGGISFGQAYWASMVLA

SEQ ID NO: 10953 - protein, 275 aa, Lawsonia intracellularis
MLFSFRFITYPLITIFILYTCHNALASNNDSMITSENFESQLRLLLHNHPELVLDVLREHSELVLEIAQQGSKQRQHKSLIAQWKKDITTPKNMHLENRPIRGNPKAPVTIVAFSDFTCLYCSQASKTVQQMLIDYKDNVKYIFKHFPLKGHTISQQAAIYFIAASFQSNEKAWALYDLLFQKRDELLQNGEQTLKQAVKEVGLDIKKLMSDLNKAEVNNILGQDIKDAAQLDISGTPYFIVNNLILRGALPPELFTEAINMALKNTKEVSTSPK

SEQ ID NO: 10954 - protein, 347 aa, Lawsonia intracellularis
MIIKCDIDTIALPKNFLKEKKTTITLGNFDGVHLGHQALLKTIYLTAKKQQSISTVITFEPHPQAVLIGESPSLLTTKKEKLKLIKSMGIDLIFQLNFTSTLANMTTEQFVQSILLERLHMEGIVLGHDFSMGKERLGTQHVLSTLGKTMGFTVTHQPVFTFKEQPVSSSLIREAIQEGAIEKANLLLGRCYSIDGTIIHGKKRGRMLGFPTANLALSSNLIPSTGVYATLVTLESNQDNTFYIPVQHQKNTFLAVTNIGINPTFGDSIPKIETHLLNFHNDLYEQHMTINFLKKLREEAIFSNISSLITQIKDDISQTKTIFKNMLWPQSLSLEDPVDRMDATLKT

SEQ ID NO: 10955 - protein, 293 aa, Lawsonia intracellularis
MSLVINNNLMAVNAQRNLSKSYGELSSSVRKLSSGLRVGTAADDSAGLAIRELMRSDIATTQQGIRNANDAISMIQTADGALGVIDEKLIRMKELAEQAATGTYNSTQRMIIDSEYQAMASEITRIANATEFNGIKLLDGSLSGNHDGKKINSTGAVRIHFGTSNSSAEDYYDIKIGGSTASALGLGNTVKGAGATVSTQAAAQNALKAIDNAIVSKDKIRAHLGGLQNRLEATVDNLSIQNENLQAAESRISDIDVSQEMTQFVRNQILTQTGVAMLSQANSLPRMAQQLIG

SEQ ID NO: 10956 - protein, 167 aa, Lawsonia intracellularis
MNLLYQLNILDLVLVILCIFFILKGLNRGLLQELAGIIIFIISLWTAYMLYIKFGNMLLSYIGSQKWSYFLAYIAIFFSVMIISSIMSGLLQKHLGWKSGGWINWLGGGVIGALKAFVFCMIIIAVFEYTADSKPFVLESKIVTFVKKHDTFFREFIKHSIGNERSI

SEQ ID NO: 10957 - protein, 314 aa, Lawsonia intracellularis
VRITMDNYTVSLTTTSSIPLVLKNPVLTASGTFGYGAEFIGYGDLSQLGGIIVKGLSLKPRKGNPLPRIAETPCGMLNTIGLQNDGVELFIQKKLPRLPWKETPVIANLYATSVEEFSELTAILAAEEGVAALEVNVSCPNVKSGGTFFGQDPSLAAKVTEAVCKNAGSKPVMVKLSPNVTDITIIAKAVESAGADAISCINTLTGMAVDIRKRKSLLSTVIGGLSGPGIKPIALRCVWEVCKAVNIPVIGIGGITSARDVLEFILVGAHAVQIGTMNFIQPDIAFRIAEALPIICNELGIKNFDSFRGSLQVE

SEQ ID NO: 10958 - protein, 268 aa, Lawsonia intracellularis
MASANFYNLAVIDNIPFGLAGMQGHFFALRLELPDWKGWAPGQFVMIRPQSWNLEIPWARPFSICRVTKEELVIFFQVSGKGTERMAYLRSGNMVHLWGPLGNRFSTEEKPTLILAGGIGIAPFIGYIDSHPNPKNLYMMFSHKYPNDCYPIENLSEKVNFFSFQENTLQDREVFLEQVSTQVKNYAACNGLILVCGPTPFLKFVQSIALENNVRTQLSLESQMACGVGACLGCVVQTTDKWPVKNMAGMPVPTCTNGPVFWADQITL

SEQ ID NO: 10959 - protein, 394 aa, Lawsonia intracellularis
MYNMPKGFRFATARAGFRRAYCNDTALVVSETPAVAAGTFTLHKFPAAPVQIGKERLSNNLTMRAILINSGQANACTGYEGLKNCRHTLELLSNAIGFNSQNILPASTGVIGVQFNMALWEKVIPVLIERLGKDGPEDFAKAIMTTDAFPKFTHKKVQLSQGTINIVAMAKGAGMICPQMATMLAVILCDADIQVECWRELISHTVNITFNRITVDGDTSTNDTVYALSNGCSGISITNNESLNLLQEGLTSILSELAYMLVQDGEGATKVGHIYVTGALSDTDAETVARTVGNSQLVKTALFGQDANWGRIIAAIGRSHATFDPLAVCVKLCGVTVFLNGQPTKDNFDDILKEPLQQKDILIEIQLGHGPGMYKLLTSDLTHDYITCNSAYRS

SEQ ID NO: 10960 - protein, 321 aa, Lawsonia intracellularis
LYIELIMQPIIVSSNEAGQKLFQFLTRRLTVPKSILHRWIRTGQTRINGKRVTPFTIVNFKDKIRIPPFAYEYKKKDLTTSLIHNQYDISPISSHTTSPLPPVIAHSPEFIIFYKPAGLAVHGGTGQTDSLAHRLSQHYAHSTFMPTPVHRLDKDTSGLLLVAKTYNSLRYFSELFASHSTQLTKEYLAWVVGICPWTQPICLEDILTKKQKQDNYSRLNSYQNKLQQTSAQKASLTVRCIKQYKDKSLLLIKLHTGRTHQIRIQLSIHGFPIIGDKKYGNTIRSHNLKLHAFRLSFPGYTFTILPSWDDKWQVTQEDIPN

SEQ ID NO: 10961 - protein, 260 aa, Lawsonia intracellularis
LGLFMKYMLSLWINILFCFFFIVNPIYAEKKEHYINGIDAHYPPFSFIDEHGDPTGFDVEALNWIANKLGFTVEHRPISWDGIIPALLAKKIDMICSGMSISPEREKNILFTRPYWITQKILIVHKDSKLTPEEIFYGENIIVGVQCGTNEATFLEKELKNKGYKYKLRYYDSSPLVIKDLLNGRINAAVMDCLPVDNAIKHNKAIKKLYIIDYSDAFGVAVRKENTQLAKRIEDGFLLLQADPFWETLKQKYLPLRENP

SEQ ID NO: 10962 - protein, 232 aa, Lawsonia intracellularis
MLNISSELLHSINIIIEALPNIFQGSLVTIITVLLALFIGLILGIPMAILQVYGPPYIRYSIQIYCWFFRGVPILLLLFLFYFGLFELLQLNFSAVTTSCIVLGIASSSYQTQIIRSAIQMIPSGQLKAAKALGMTSTQAILVIILPQALRLSIPGWSNEYSILLKDSAICFVLGTPEIMAQTQFVASRTYEHLLLYIVAGILYFLITLIGVSLLRRLEQYLYLPGYTASLH

SEQ ID NO: 10963 - protein, 291 aa, Lawsonia intracellularis
MIDSTYPILYVKNITKSFNNKLILNNISVNINKGDIKVLIGPSGAGKSTFLQCLNCLILPDSGGIYLYGDKIDLSNHYSLSELRKKVGMIFQDFNLFDHLTTEENISIALRKVANYSYKAARERALEELAQVGLIDKANLYPAQLSGGQKQRLAIARALAMEPNVMLLDEPTSALDPKLTCEVLTVIQKLANNGMTMVITTHQMDFACAIATDILFMEHGEIVEQGSPCQLLSPEAQTRTNGFFKSFISPLQSNSLSIEKPSISMLLSGDLSHDLTNSGTESISFPEKNEN

SEQ ID NO: 10964 - protein, 228 aa, Lawsonia intracellularis
MLLDITFITQTVVPTLNKGLLVSIALIIPSAIIGFLLGVCIGIIRVFGKRWLQRLGNIFTLIFRGVPLTVQLMILYFGLPNINIYFEPYIAAVIGFTLCTGAYQSEYIRGALLSIKKGQLQAAYALGFTRLKAILFIIIPQATRYALPGCGNELVYLIKYSSLAYLITCIELTGEAKILVSQTVKPMEIYFIAAIYYLSFVSIATWILKKLETLYAIPGFGKKHIDYL

SEQ ID NO: 10965 - protein, 606 aa, Lawsonia intracellularis
MKDLLMPIQENIRNFSIIAHIDHGKSTLADRILEYTNLVSDREKRDQYLDKMELERERGITIKAQTVRIPYITADGKTYILNLIDTPGHVDFNYEVSRSLSACEGSLLVIDTTQGVEAQTLANVYLALEHNHEVIPILNKIDLPSADIEKVKAEIEETIGLDCSTAISISAKTGLGVDSVLEAIVQQLPAPKGDPNNPLKALIFDSWYDAYQGVVVLFRIMDGTIKKNDIIKLFSTEKSYEITRLGVFSPEAIDIPQLSAGEVGFLCGNIKTLGDAKVGDTITLLHNPCTKAIPGFKEIQPVVFCGLYPSESSDYDILKAALEKLQLNDAAFSWEPETSQALGFGFRCGFLGLLHMEIIQERLEREFQVELIATAPSVIYKVETTDGKIQEIDNPSKLPELGKIVHLYEPYVHIDIHVPSEFVGNVLKLCEEKRGIQKNIAYPAQQRVIITYELPFSEIVFDFFDRLKSATKGYASMDYEVIDYRISNLVRLDILLNGEPVDALAVIVHRDKAYHYGRSLAIKLKKTIPRQMFEVAIQAAIGQKVIARESISALRKNVTAKCYGGDITRKRKLLEKQKEGKKRMKRMGNVELPQEAFLAALQMGDD

SEQ ID NO: 10966 - protein, 122 aa, Lawsonia intracellularis
MRNPVFLDSILVGLWNITSFFIPTPLLTMATILGGTAALCALFCIGMILTAQLSSSEGFVAGWFIQHLPVHILKLAIQPLITYCCFTLLGLNSKLVGVIVLIVAMPKGIIAYIIAEKYYVYT

SEQ ID NO: 10967 - protein, 398 aa, Lawsonia intracellularis
MAKDATLESLDDIIDLVDIVQSSDKSESQDSEKVDFDSQLSDILSNDDPISLEDIPDLDELFAEESEEVKEENNSQQVDIDSEDLLDNLGEEKVETNVLSKIDSDPEDLDALLDNLFSEEEKEPIKNQKESSNASLNLGQLEFSTNEDKTNFLEKALDGLDDLDDLLMEEDLDSTVDISPKKIVDVVEQEESPNQLEDIDKTLPDVVVEDVTNVEHILSDKDKGEVEAILDAVKDPAFLANEKNLLDNNSNVPQSLSAVSSEEIQISSNDSRVMETAAKKVQSSDTTLEVSSVLPSVTNTVIDELNVRIQQLENESQALKQRVSALELIIMAHESEVEELQDSNVMRFNSIDEKIDNSLQMDILVKEVVDRLQPEIDKFAAEAAVRVIREEIELLLKK

SEQ ID NO: 10968 - protein, 403 aa, Lawsonia intracellularis
MGRYLVRWRYLSIIICFLGIVGCSNSLMESMSSNGLSYTNLRPFYNIKEQQSATAIAKTFSPRKQNLRSWKELRPALEATHQYLSKKDLEQVAIAHGDIAITWGQLFNTVNRLETLLDQLDEHPEVLSKDFQWIGLTEDINFLGYYEPMFKASYKPSKEYRYPLYKTPPDLHQLNLGLFKKELVGSHIIYRQTEKGPIPYYSRYEIDDKGVLKGKGLEVAWLKDPLDSYFLHIQGSGLLVFEDGSSIHIGFAGSNGQEYHSLASYLETQGIIPQGNKNIELIRNWIQENPLRMSELLYKNNRYVFFKLYKDGPIGSSGYILSPWISMSVDRSVFPLGAIIAFDLSNNASTNEFTKETCGIGIAQDSGGVKGKKIDIFCGSGQQAYQESISLSGMGNAWILLAK

SEQ ID NO: 10969 - protein, 149 aa, Lawsonia intracellularis
MQHTPSHTICYSHRVSYGETDAMGYLYHAEYLHIFEIGRTEFLRSLGISYAEIESRGIRLPVCHATCHYRHPAHYDEVLNVHIKINEIKKASLTFSYSVINKHSNKLLTNGTTRLACTNINGQLIKIPEWLINIFYGSLLMIPNSHNCS

SEQ ID NO: 10970 - protein, 273 aa, Lawsonia intracellularis
LLADIHMHTSASHGKNTVEEMYYAAKDKGIDIQGFSEHAPRPHKYSYPIEYNKHLSYNFPQYIENVSHIKKCGFEHHKVLLGVEIDWLPSESLFMDSVISMYNFDYIIGGVHFLGSWGFDFTIEDWRNLSLSQCYMHYKNYFSSLKEMVCSKLMHVVAHFDLIKIFTPSIFRTWINSAEGQKIVLELLIAIRDSGMSLEVSSAGLRKFCKEIYPCLEIIKMAKAQGVSICFSSDAHCKNTIGFAFNQLFYYTKSVGYCAYRIFEKGKAKVITF

SEQ ID NO: 10971 - protein, 404 aa, Lawsonia intracellularis
LIQFFACIFRGEDMTIEKGRYFFTSESVTEGHPDKVADQISDAVLDTLLEQDPHSRVACEALVSTGMAIIAGEITTNGYADLLSVVRRTIQSIGYNSSEMGFDWQTCAVLSTIDKQSLDIAQGIDRAKPEEQGAGDQGMMFGFACRETPTLMPAPIYWAHQLSQKLTKVRKDGEVSFFRPDGKTQISFEYYNGVPVRINNVVVSTQHAPSVSQSDLIEAVKSKVIRPVLEPTGMFDEKECEIYINTTGRFVVGGPMGDCGLTGRKIIQDTYGGSGHHGGGAFSGKDASKVDRSGAYMARYIAKNVVGTGLAQRCEVQIAYCIGVAKPVSVLVSSLGTSDIPDEVLTKAVLEVFDLRPYFITKRLDLLRPIYSKTSCYGHFGRELPEFTWEQLDAVKDLQTALKI

SEQ ID NO: 10972 - protein, 196 aa, Lawsonia intracellularis
MIKKPVYQGQIDVFCAAYAAINSIRIAQGINLINARKLLHEALLNVAKDLELFQKVLDQKTDYVFWVDNILEQESKRGSITVKKAFPHATEKLDNHITSDDVWCSIINWLSNGEKRSCLFQFIRYLPTKGLFLQHWTCGYNLLYNNTLLLFADSSLEPDSLQYIYKKELGTTFKNLHDEVIIKPYTLRLVEPILIS

SEQ ID NO: 10973 - protein, 294 aa, Lawsonia intracellularis
LIIKVEKYMQVIRAKTAGTCWGVDLALRKLSQSIENKEKANTRFVMYGLIIHNPQVIVEYKAQGVICVDSIEEVRAGDTVIIRAHGIPIYEEQQLTDIGINLIDATCPKVKKTQLAIANATNSETILLLFGEANHPEVKGLISYSQGPFHVFDTKQFVEDFDNSQNKTIVLASQTTQDEITFKEIQEILHQKGIQPVILNTICDATYKRQRELLSITEQVNTMVVVGGFTSGNTRRLVELSKAKGIKTFHIETVDALYGNNELDQNDIIGLTGGASTPKQLIDKVEDFLSNNLS

SEQ ID NO: 10974 - protein, 316 aa, Lawsonia intracellularis
MSQTGILLESGTNELEIVEFFLDEDDDNGEVYRGYYGVNVAKVLEIIRMPKVTELPDTQDESILGAFNLRSHVIPLVDLGHWLGKKLAKTDEPKKVIVTEFNDVTTSFMVSGVNRIHRISWDEVEPPNDYVSQVSKTTITGIITIEDRIVFILDLEKIVAELNPALSLRLDEAVTWGSEIRYRALIADDSNLIREMLKDLMQKANFEVEAVNNGREAWERLTELKNRATEENKNITDYVQAVITDIEMPSMDGLNLCKRIKEDPQLRKLPVVLFSSIITDKLRHKGIDVGADDQISKPEVTHLAKRVYALIAERQS

SEQ ID NO: 10975 - protein, 443 aa, Lawsonia intracellularis
MHICVIGTGYVGLVSAACFAEMGNHVYCVDINPAVIEGLCHGKIHIFEPGLSDLVKRNTSEGRLYFTTDLSTGIKDAEVAFIAVGTPSTEEGTCDTSYVEHVASSLGQCMSSPLIIVNKSTVPVGTADKIRILVKEALKTRGIELSFDVVSNPEFLKEGDAIADFMKPDRIIVGTDSESSAHLLHKLYAPFARNREKLIVMSVRSAELTKYAANCMLATKISFINEMALLCEKLGADIREVRKGIGADHRIGYHFIYPGVGYGGSCFPKDIKALIHTANQIGIDSKLLEAVEVVNDRQKHSMAVKIQEYFSGQSGIKGKTLALWGLAFKANTDDVRESPAIAIINNLTAGGMYIRAFDPVAYDTAKAVLHDNMLVSIEADPYTICNNSDALLIVTEWNQFRNPDFEKIKTLLNMPVIFDGRNLYSPSFMRQCGFTYYCIGYGK

SEQ ID NO: 10976 - protein, 125 aa, Lawsonia intracellularis
MAIIGLGMDLVEILRIKKTFSTFGDVFLYKIFTSIEYNNFLLKPSIASLAARFAAKEAASKALGTGFSDGITFKNIEISSLPNGKPQLHFQGNAKKKAISLGVNNIMITLTHSHNTAGAVVILET

SEQ ID NO: 10977 - protein, 177 aa, Lawsonia intracellularis
MEIRGTTILAVRHKGHVALAGDGQVTLGQSVVMKHTAKKVRRMYKNQVIAGFAGTTADAFTLFERFDNYLEETNGNLVRAAVELAKEWRKDKYLRRLEAMLLVVDKDHTFVLSGTGDVIEPDDGIAAIGSGGLYAVAAARALVAHSELSAAEIARESMRITAEICVFTNLNLTLETL

SEQ ID NO: 10978 - protein, 265 aa, Lawsonia intracellularis
MKKLLIVLLAIIVCSYSYTHAKMEPLIEGVIKRGVLRVGFAPFLPWIIQNKDGEYVGFDIDIAKRLAQDLGVTLQLVPTRWTEIIPSLLANKFDIIISGATITLERNLQVNFSNPYHQTDIEVLANAKKVKGMKFPQDFNKPEVIVAIRNGSTVITPAKQLLPKASFRLFDDEVASIKDVESGQSHILLASAPLPAIQAINSNGNLIRLDTLPITHQSVGFAIKKGDPDSLNILNNWIKFIENEGWLSERKNYWFNSLKWKNEVI

SEQ ID NO: 10979 - protein, 160 aa, Lawsonia intracellularis
MKWFTHKAIAIAGALALEASPPGLFATLVGSILPDLADRTFAMGNKQQWRRIHRQTSHWMGWYLLLMILGLMNFPLKHFALSPIANQLFSEIMLWVGFGGITHVLLDSLTPMGIPMWPFGSKKRIGLSLISTGSVGELVFLIISISCIISQYNWSKMLSK

SEQ ID NO: 10980 - protein, 305 aa, Lawsonia intracellularis
MIYSHLSSTSCTITTGCKVNLNLYITGILPNGWHKIDSIFLPLSEPHDELHIEITNHNQGLHLSCNILDIELENNILTKTYTLFTKATHFTPSISIYLKKGIPYGAGLGGGSSDAAALLTWLQKNSPLPLSPSKLLKLAAEIGADVPFFLKNKPCRATGIGEKLEEISLSNLNISGNTLFIICPNLKISTPYAYKMWDDYNKKQIATSSRYNNNLTKKYSWDRSSPSTHLSDYLWMKNDFEPVIFSEYTELSVFKEQLLQFGARAAVLSGSGSSIYGLFKEYNQTSIMTEFYKKKNILTFSQLLQ

SEQ ID NO: 10981 - protein, 321 aa, Lawsonia intracellularis
MAIKPKAFSFMYGELKILSGTANLPLAHAICNNLGCPLTPSLCETFSDGETRIEINSSVRGGDVFVIQPTCDPVNYNLMQLCLMLDALKRASATRITAVIPYYGYARQDRKVNPRAPISAKLVADFLSTAGANRIVTVDLHAGQIQGFFNCPVDNLFASKALLEPFFSMKDEIVVVSPDAGGVERARAFAKKIEAPLAIIDKRRDNPNQAIATSVIGDVKNRIAILVDDIIDTAGTITAAAELLLRAGAREVNATATHGVLSGPAIENLNRSVFTKVLVTDTIPIQDKNKECSKIHVISVAGLLATAIYNIHNSSSVSVLF

SEQ ID NO: 10982 - protein, 197 aa, Lawsonia intracellularis
MDNLKTLVVQKRLDLGKGPNRRLHKKNLIPGIFYTSSGKNIPIQLPELPFTKIFSEVGRTTVFNLKIESDKENITHPVIIWELQYYPVKNRFMHVDLYGVELNKPIKIVVPLEFTGTAKGTKVGGKLETYREQLTLIANPLDIPSKITLDISDLDIGKSIYVADLKLPEGVKTSYDTNYAIVSVIMPGGNTATEQEG

SEQ ID NO: 10983 - protein, 201 aa, Lawsonia intracellularis
MSIKGIIAGLGNPGGQYEKTRHNIGFMVINKLITITSASKLSGKKFYCELWKTTTIIDNYLLAKPQTYMNLSGEAIHPLVEWYNITKDNLLVIHDELDLPIGKMKLQQGGGTAGHNGLKSIIHNLGTKDFYRLRIGIGRSPLPSENTVNWVLGHLSMKELTTLNNLFPTIFDALSFFIKDEKETAIRMINSFTLSETVNLS

SEQ ID NO: 10984 - protein, 230 aa, Lawsonia intracellularis
MKNSWPLIISISFIILITGCATKTICIIDQQEFSVMYRHLAPLLWNKNVVDNNGYYQEQINKKLSPKIGEYLFQHLPVNLTSPTTKTNVLTFAQSQNPYTKITITHYGFSFQDNKRKIQIKLIAQTDWFNKGNNDWIILYHVHSSNISTNYYLILPHPKESLPIEPQLIAICDELNNTCTIINDNSTNIQNFGTSYFEVEPEIYSIISSPKKQNIQENKETTVTINQLQK

SEQ ID NO: 10985 - protein, 264 aa, Lawsonia intracellularis
MQQAKFSGLFAALSAEHRMNFIANNLANVNTAGYKQDKLAFKDTMIQFAHDQIREPIATVRSKPLFPEPNNAARVRIAVSNTDFAQGSMQFTGNPLDFAITGENGFFRIQSPQGNYLTRNGSFVLDATGQLVTKQGWPVLGDGGPITIPEGTKKISITPDGRIFADDAEVGTIQFVSLDDVKKLEKVGANLYRPKEGLEIIEGNANETGAIINQGFLESSNVNVVEEMVKMIEVNRQFDAYQKVMQTSDSLDREAYSKVGRTSR

SEQ ID NO: 10986 - protein, 261 aa, Lawsonia intracellularis
MMRSLWTAATGMVAQQLNIDVISNNLANTNTSGFKKSRAEFEDLMYQTMKIAGSATDGDNRIPVGIQVGMGVRPTAVHKFFTQGDFQNTGNPLDMAIEGEGFFQVLVGDQLMYTRAGAFKLNQDGTLVTANGYPLQPEFTVPPDAKSVAISERGRITALDANGQEIAAGEIPLYSFVNPAGLDAKGRNLYIPTEASGEAVEGVPGEENLGTIAQGFLEMSNVEVVDEMVQMIVGQRAYEMNSKAIQTSDNMLQTAVQLKRS

SEQ ID NO: 10987 - protein, 327 aa, Lawsonia intracellularis
MKYIRLLLFTHCIAFIFHITIAHNCAANSLGSDWRIHIKEASVVHGDMVTLADIAKVYGTPPPGVWEKISSIPLWESPEKPGVPMKINRVRLEKALKETLGEASFFSVIPSNVAIQKGGEILYENQLQDLTQKAIKNVYPMLASHGELSDYRIPAYIFIPQKGQYVEVVLPTISPKRLSLQFVLKDIDGTVLRQYTGTVLLSVWQPVPSVGKPLNRGDYVNPEDVTWINKNIAFLRDDIWDGKGGPWQIKRSIGIGQPIYQSDLEPLAVVRKGDIIKLNYNKGSIRLSVNVEALENGTHGSFIQVRNLQSKKIVHATVVDSNTVEIR

SEQ ID NO: 10988 - protein, 230 aa, Lawsonia intracellularis
MKKLLFTSGCILILTGCSAPNKTPVVAPPITPPPAYVEPEDSYSNPGSLYSSAESDGLFADTRARRVGDIVMVKIVENNTAKNKADTTADKKTANTYGIDAFFGRQYIGGGSTKIPVGSVAFDTTSESGTTSTGETKREGAINGTIAARVLRVMPGGLLEIEGVRETRVNNETQYIVITGLIRPMDIEPDNSIMSNRISDAKIAYYGQGVLSEKQKPGWFTRFMDTLWPF

SEQ ID NO: 10989 - protein, 379 aa, Lawsonia intracellularis
MLSSIIRPTKNCLLHFIIRSSYLTLLFIAVFHNPAQSVRIKDIATFSGVRNNQLIGYGLVIGLAGTGDKRDSPFTASSMTNMLERMGVAVDANKIKPKNVAAVMVTANMPVSARPGTELDVTVSSVGDAKSLQGGVLLQTPLKGVDGKVYALAQGSLIIGGYSAEGTAASVQKNSTTVGSIPGGGIVEKGIPFDFNTQQNLTLNMNSNDFSTTMQVVNRLNATMGGNFASAIDAGTVRIDIPPAYKGNLVPLIASIENLEINPESVAKVVVDEKTGTIVLGREVRLSRVAVAHGNLQVVIQESAQVSQPGPFSQGQTVITPETNLTLQEETKRLNLLEGASLQELVDGLNAIGATPRDMISILRALKAAGSLHAQLEVL

SEQ ID NO: 10990 - protein, 227 aa, Lawsonia intracellularis
MINPIDPSLAQNSAEEQNLKEIKRKADKEIQNLDPNAAAAKEKKLREAAEGFEAIFIQQMWQSMRASLPKEGIMHSREEQFWQGMYDQELGKSMASAGGIGLADMMMAQLSKKLENASEVTAESMHRTPLDIKPVPLIEEKAPQELKPTNKKLEHIYNGELSQHNSSIKNNTKPSTTTNTLTPVEEALNEFSKQIKTPSSTPTENITSSDSNTKPPIISNTVTIPKN

SEQ ID NO: 10991 - protein, 176 aa, Lawsonia intracellularis
MPCITLLNKNSFLIYRRLLMYMIIHGSLDRQKKGLALLQELLNEEFSLLMDRKTEEIMALEFSIHSLLRQLAGEKIFIQKRLNGGKLLDYAELLSDPEQTKAIKQLWQNIDTLEQDCSRQASLNAELSLALLDQSKNLLSFLHKNVQPQETLSTYGRSGTYNHHSRPEGTLLSGRL

SEQ ID NO: 10992 - protein, 705 aa, Lawsonia intracellularis
MSINTLFGIGKSAIAGNQTALNVTGNNIANVNTQGYSRQSVRFEDRYGLNQTPGMLGQGVHTAEIYRNFNRFVEDAYLNRFSQNTRWDEQSAIMNSIESIFNESNRTGISSLLGEFFKGWQNLSLRPEDAATREAVLSTAKNLTQLINDAKSSLQKTQQEMDLYIQQSVNKVNELVDAIKNINKQISATYIPGQQNPNQLLDQRDQLVRELANLVDIEVKDKGGGNFDIQLKSGQPLLEGQIGYTLSVGGQRVENYLKQDSKYTGTITSSGSDSHEYSFEIINPPSGGAPGSMRVSLDGGKTWLRNEDGSELNVPIPTTPGETIKVKNLEISFDQDPSQLVSGDRFDVIPKTGLYWNSPTRPPINITPQTLNDGTENTGRLTGGKLTAYFSTRDYNAGRYIDKLDALANSIVWEVNRIHSQGAGEQKMTYSLGSSQVNRTDVPLGTSQSGLAYGNRLTTGNLSFQIYDENGKPLPVGTPPNGIPESLDLDPGTPGVQNFDPSIHSLEDLVNAINHPNNYGEFMKASIVNGSLQLTSRPGTSFAAKTDTTGLLAALGINTFFQGSDATDMAIKPDVIQNTNFINAGKVNANGEVSTGDNSIAKELADLATKEVTISTGWETTHQTLGAYYGALVGLVGSDTRTAKFNADYNKTLSNELEQQALSITGVNLDEEMTQLIKFQHSYTAAAKLITTADQMLQTLLSLKQ

SEQ ID NO: 10993 - protein, 525 aa, Lawsonia intracellularis
MRVTHQSMYSGMISQMNKSLSDYMETNIQGGTMKRINRPSDDPAGTARILSYRGSIGGIEQFKTNTDTAMGWLSLADETLNQVSTVVTKIKELAEQAATDTYTPDQREAIGFQLRQLMGTLINLSNNQFEGKHIFSGQDYNKSSFLEGLTVTSGDPNVNPNPPMQVTGTLEKTGLIRFEKDETIPPAADLNYQWSTDGGKTWQTATIPAGGREITIGGAVVTVPAPATTNVTAFDPDKPLGDTNGSLLYVRPTAIYQGSDNNSKPIVDRYGTVPMPPLNTNTVGTFSDNVVVKFPNGVDLSTPGSFDFSYSTDGGKTWTAGNSEVIVSPGPPSTSTARLILPGGYMDIGSADTTSPNNTIPPDGQLILRPQRTDLSFEIMEGQNITVTNVGKDIFGGIYSTNGSSNLEPMFGQNDGRNLFETVGNLIAYTETNNQEGIANALKDLELAQKNILTQAARIGGKENRLEITKEALDTNKYDQTQRLSGVEDADLTELVSRLAQQQMAYSTILKSSSMIMQLNLTKYI

SEQ ID NO: 10994 - protein, 229 aa, Lawsonia intracellularis
MELSMLILTRRAGESLYLDDNIRITILGVQGKQVKIGLDVPPEMNIYREEVYQRVKEENTLATTINNNDLIAAAQLTNKEEIIIDTRLGQQTIEPEKIINFPQGLIGFENKQKFILLQIQPASPFIILQSIDNPKLGLLVADPYSFIKHYTVQLNDTEKTILQSEVHNLAILVTMTIPKGKPDLARLNLTGPILINYDTKIGLQVPQTNLETTSHVYLYHPGEEPILNK

SEQ ID NO: 10995 - protein, 526 aa, Lawsonia intracellularis
MFLPLPTPHEMSLWDKESINIGVPETVLMENSSREALHVLKKTFGSIENKYILILMGSGKNGGDAVCLARHLHDAKANVLVLHTRSFIHYKGTTRQYLKLAKHCGILFSLAESWITKYNKTPWGEPDIIIDGLIGTGLSSNLQQLELELVNTVNKLSKKSFILALDIPSGLSGLTGKPQPTAITADITVTFEAAKPGLILPEASNYVGVLHICSIGIPLCVRKKNPPSYQMINQKSKLPLPKPQPMWYKGNAGHLLIIGGSSNSEGILTGAPCLTALAALRTGAGLVTIAAPYKLCNEIKANYPDIMMLPLGTPETYEWGPDLIEQILSKLHKYNCIVIGPGIGRTIGTTQFIAKLLSTPSRIPKVIDADAIIALADETTILKNLNHTDILTPHPGEAATLLKTNTTLIQKNRFDAIHQLTSLSSSTWILKGAGTMIASPQSPTTIFPQAIPNLAIGGSGDVLSGCIGTLLIHYHEQPHIAACLATQLHLEAGAILSKQFLYRGNTALDIANAIPNAYINLMKTYS

SEQ ID NO: 10996 - protein, 509 aa, Lawsonia intracellularis
MTVRLACGALEGVDAFRVDLEVDFLRQGLPSFVMVGLAEGAVREAKERVFAALRSCGFTLPPARITVNLAPANRRKGGSGYDLPLAIGLLVASNNLPVEVISGWFMGGELSLTGTLKPIPGILPLALLARKEKAKGIIVASENAAEASVVAELSTFGARTLSEVIDFLLGKISLPIVKPVEPDLPEVESILDFADVKGQEHAKRAIEIAAAGAHNLLFVGPPGSGKTMLAKRIPTILPKLDFEESLEVTKIYSVAGLLNQQGLIQKRPFRAPHHTISEIALIGGGVSPRPGEVSLAHRGVLFLDEFPEYAKSTLEVLRQPLEEGKVTISRSMFSVVFPADCMLVAAMNPCPCGYSTDPNHSCICTASQIQRYRARLSGPLLDRIDLHITVPTVSYEELRSLTSHRCSSQLLENILRAREIQSVRYKSFSNCRTNADLSGRLLEEFCQIGPDGQNFLKEAMQKLALSARAYTRILRISRTIADLAGVKQVLVKHLAEAINCRVLDREFLN

SEQ ID NO: 10997 - protein, 564 aa, Lawsonia intracellularis
MDIYKQKALDKIPFVPSLFKTLAQGYSYKMLFKDFSAGCNIAVIALPLSLAFSIASGLTPEKGLYSSIVASLIMAFLSGSNFQICGPTGALVIIIFTIISRYGYDGLIITTIISGTILIFCGITRLGFLIKYIPYPVTIGFTLGIALLIFSSQVKDFFGLPMAETPPEFFDKWHLYLRNALSFSPSTLFTSFFTLLVIISVRFYIPRFPAPVMGVIFTTVIVWLFDLPVETIGSRFGTLPSDIPSFLVPLDFSIERLRILLPDAFTMALLIAIESLLSCVVADSMTGKRHNSNMELIAQGVGNIGSVLFNGMPATGSIGRTMTNIRSGAYSPISSIFHAIFLFGFILYLMPAIELIPLSAFAGVLVVVAYDMSDLMTVRRMFYGPTADWALMLLTFILTVVLDLTTAVYVGVILASLFFMGRMGEITQLQTVTKEYQSHEIVQDIPVEKDKLPKGVHIFSINGPLFFGVADRLQKLLEAMETTPKVFILYLHNMPTIDMTAIHTLESFIEKRRSGCKIFLADIHPATRSTLDRAGIIHAVGKENIFPTLQSAVEESTKFVEDTA

SEQ ID NO: 10998 - protein, 230 aa, Lawsonia intracellularis
MSFDFQPQVMLETAPLLLEGVELTLIITIGGLFLGLALGILVGLINTPRFPFLRTLAVIYVEIIRGTPLIVLVMFLYFALPLALDIHIPPNWAGVIAIGVNSGAYIAEIVRGSIISISHGQMEAARSTGLTHAQAMLYIIWPQAFRRMIPPLTNQCIISLKDTSLLVVIGVGELTRQGQEIISVNFRAFEVWLTVAIFYLIMTLSISALLKYLERRLVLPGRLQYAGKQY

SEQ ID NO: 10999 - protein, 249 aa, Lawsonia intracellularis
MKYKIFVFILGLFFTNTFGFFANAKGLVVAHDTNLMPFEFKDKEGNFVGFDIELWEHIAEIANIPYTFQPMDFNGIIPGLQTGSIDIAISGMTITPERAKVILFSQPYYESGLMILVRAGEESISKLEDLVGKTVGVKTGTSSVDFMKSFGKQRSLKLFPTNDGMFFDLMTGGVDAVVFDAPVLQYFASSAGKGKVKLVGPKYKGQPYGIAFRKNSEELVQKVNTALNELKRNGIYTELYKKWFGLPPE

SEQ ID NO: 11000 - protein, 574 aa, Lawsonia intracellularis
METEETMENNGTDLDFNFESALEDYLSTDFGDLEEGTIVKGEIVRIDDDNVLVDVNFKSEGQIPTIEFQNTDGNITAKVGDKIDVFVVRKNEQEGTIILSFEKAKRMQLFDQLEDLQEKNGIIKGRIVRRIKGGYTIDLRGVEAFLPGSHVDLRPVPDMDMLVNQEYEFRVLKINRRRSNVIVSRRVLLEEERDSKRQDLLQTISEGQVVVGKVKNVTEYGVFVDLGGLDGLLHITDMSWKRIRHPREMVNLGQELELKVLSFDKENQKVSLGLKQLVPDPWQDITERFPETSHHVGKVTNLVDYGVFVELESGVEGLVHISEMSWTRKLRHPSQMVHQGDEVEVVILGIDQDKKRISLGMKQVKPNPWELVGEKYPEGTILEGVVKNITEFGMFIGIEDGIDGLIHVSDISWTKKVRHPNELFKVGDTVQAKVLTVDQENEKFTLGIKQLTEDPWSNAPSVYPVGGIVKGIITNITDFGLFVEVEEGIEGLVHVSELSSKKIKSPSEIYKDGEEIQAKIIHVSAEERRLGLSIKQLKEDEEHRKSREYSRTGPDSGQSLGDLLKMKLEEPTEN

SEQ ID NO: 11001 - protein, 161 aa, Lawsonia intracellularis
VRSNYLKSVEVFTDGSCLGNPGAGGWAAILRYGDYEQEISGGFSYTTNNRMEMIAAIYALEKLKESCLVMLYTDSQYLRNAVEKQWLVFWEKNNWKTASKKPVKNQDLWKRLQRQLERHNVIFTWVRGHSGHFENERCDNLARMEASRSNLPKDCGFINEG

SEQ ID NO: 11002 - protein, 297 aa, Lawsonia intracellularis
MLYQWIIASRPWTFTAAFTPIALGTSLAISDGYHFDLFLFILALLGGIFLQAGANFLNTYGDYMSGVDTIDSAITCPQIVTGILPAYKMKYVGIGMLTTAIIIGLFLIFLCGWPVFVFGFIGFLGAASYTTGWSPYKYKGLGPIFVFFLMGPFMVLPAYYIQTYSLNMNIFFVSIPIAFLVTAIMHANDLRDIEYDNASGIKTIALWLGFKRSLLLYKVICIMAFVVLVCLVALRILPTVALLPLVLFPLLIRKFQRIKYPDITVEIKNLVKWTAGFHFLFGLFFIIGILLSPFVYV

SEQ ID NO: 11003 - protein, 208 aa, Lawsonia intracellularis
MKNHTPSGLQVLFLVLLAVIFWAIVFGTTYINFWLGMSCSSMVLAFFSFLLGSPFHYSKFSWKVCLLGIGSAFILYSIFYLGDMIATKLLPFAQAQVADIYSIREQSNSVLIGFILLFITSPAEEIFWRGFFQRWAMTRFGDLGGWLLAGVSYAGVHIWSMNSMLIFSAAIAGLFWGLIFWRTSNLIPCIVSHSLWTLMVFVLFPILG

SEQ ID NO: 11004 - protein, 304 aa, Lawsonia intracellularis
MLYTWIIATRPWSFTAALIPISLGTALAWSGTVKTPGVPFHFFCFLLILLSGLLLQAGTNLLNTYGDFISGVDTLDSAVTCPQLVRGILLPEKVKQVGIALLVLSVILGLILYLLSGWPILLFGVIGLIGSATYTTGSSPYKYKGLGPIFVFFLMGPCMVLPAYYVQADVLTWSSFFASLPISFLVTAIMHANDLRDIQHDKLANISTVAIWLELKSSLVLYRILCLGAFVSLIFVVAFGLVPITGILPLALTPYLNSKLKRLRASEIDNELIVLEGWTAQFHFLFGVFYVVGVLLWGIIQVIL

SEQ ID NO: 11005 - protein, 208 aa, Lawsonia intracellularis
VFITIEGIEGSGKTTLINRLSEYFSSRGEDVIVTREPGGCELGGLLRSLVLSSELGLTAESELFLFLADRAQHVSECIQPAIMNGKTVFCDRYADSTIVYQGYGRGMNIGKLWEFNEVAIKGIWPQKTLLLDIDVEKALERACIRNEALGLNIVEGRFESEPMDFHNRIRDGFLHWAGRNPDRITILNADTTPEDLFQQSVSVLREIV

SEQ ID NO: 11006 - protein, 352 aa, Lawsonia intracellularis
MDGMQSSNKSFNKNQWIKDVTLSEEVASLFLIAASSQQQAKNGPFWRLELKDVTGTIEARIWSPMSLEYPKIPTGIIAYVKGRAESYREQLQINIIELHIIDEDELLTIDIGMFLPASVRNSQDMFSELEAICNKEFTHKPWHRFVFSILNDPEVKPKLLVAPAAKGVHHAWVGGLLEHILSVVKVSLLICDHYNCLDRQTLLAGAIFHDIGKLWELSGGLDNNYTDEGRLIGHINISLEKFQSYLIQSGLEEGLAMHFKHLVLSHHGLYEFASPRLPQTAEAFALHYIDNLDAKIAQSIAALQDISSGETGWSSYQKTLERQLYQATKTPLESNKLEDQSIKQKVSQCSLL

SEQ ID NO: 11007 - protein, 251 aa, Lawsonia intracellularis
MNILLTNDDGIHASGLRAIYNELVKLGHNVFPFAPTVERSGASNSVSLNVPLTTQDVYDGDFKGTAINGTPVDCVKVGLAKLHENPPDLIISGINAGHNVGTDILYSGTVAAAMEGCVAGIPSIAFSRPREEVDPTQSYAEHAANLLKKIDFSLVPKGQILNINYPSISIKKTLGIKVCAMSTQGWEHKLHKKKDDNGKPYWFISPYIPYSHGISQTDVFFLLEGWITITPLMFNMTAQTTLSNLEQHSFT

SEQ ID NO: 11008 - protein, 307 aa, Lawsonia intracellularis
MPLTGPKVMFEKAYKEGYAIGAFNVNNMEIIQGILMAATEERAPVILQVSAGARNYAGKNYIVKLIEAGVLDTDIPIVLHLDHGADFAICKTCIDDGFTSVMIDGSHLPFEENIALTKQVVDYAHAHGVWVEAELGRLAGVEDDVSSEHSVYTDPDQAVEFVQRSGCDSLAIAIGTSHGAYKFKGKPELDFARLETIGNLLPDFPLVLHGASSVSQQYVDMCNKYGGKIAGSAGVPEEFLRKAASLAVCKINIDTDIRLAMTASIRKFFVEHPEEFDPRSYLKLARQAVKDMVQHKIKYVLGCANTI

SEQ ID NO: 11009 - protein, 333 aa, Lawsonia intracellularis
MSVRIGLNGFGRIGRYLIRLMANQSYMPVVAINARADNASLAHLFKYDSIHGPFKGSISYDDDGLIINGHHINVSRKKVGEWIWKDMDVNLVVESTGAIKTRDGLEAHIQTGAAKVIISTASKDTDALIIMGVNDSDYLPKDHHILSAGSCTTNCLAPVVKVLNDVFGIEHGVMTTIHSYTMSQRILDGSQKDLRRARAATLSLIPTTTGAAKAIGLVIPELEGKIDGMAIRVPTPNVSLVDFTCELKQPVTVDDINNTLKNAAEGKLKNILGYCDEPLVSIDYTGDIHGGVVDALSTSVISSKLAKILVWYDNEAGFTNQLLRLINLVEKSM

SEQ ID NO: 11010 - protein, 299 aa, Lawsonia intracellularis
MINRDVLSQYIATDEAELKIFVGFFVGISALLICIMLFSLWLVFTIGSNNQPATVSLFVILFCFLLVSPISWISVELLLHFYMGWTVMSPLKLRSIVIRFALPMVELFVRVIKGPIEPVRRSFIAINNLLLLKAKLSYEPHDVLVLAPHCSQASRCKLRLTYNNDNCARCGKCPIGSLLELRDESGVKVLSATGGTMARRIIKEVRPKMIVGIACERDLVEGIHDIPSFFPVYGFLNECPNGPCIDTLINVSRLRKVLKKFIPSLHFSNEEKSETTPLKKWIPPSEYTNIVAQSEKIIQ

SEQ ID NO: 11011 - protein, 322 aa, Lawsonia intracellularis
MILQNKPLRIVFMGTPEFAAIILQKIVASGKVDIIASYCQPDRPVGRGHKVQFSAVKILSNSLRIPVYQPVNFKSEYEIEKLYALKPDLLVVAAYGLILPQSVLDIPAISPLNVHASLLPCYRGAAPIQRALMNNDKKTGVTIIRMEKGLDTGAMFTHEEIPINMEDTAATMHEKLAQLGGKLLINIFEQIIQGTLSDPTPQDDIQATYAPKLTKSDGCIYWDMPAENVHAVVRGVTPWPGAQTSFKLVNRNPINILFQPGEIGSNELFKYNEGDSPLPGSILGLKGNAIAIACKDVPYLIYTLRPEGRKTMTAKDFWNGYL

SEQ ID NO: 11012 - protein, 171 aa, Lawsonia intracellularis
MSLKILQYPDISLQKISLEVQDITQDIHNLAKQMVQTMYDANGIGLAAPQVGYLLRLIVVDVSGPEQKSSLLVLINPKITPVIDSGFIEGEEGCLSVPDYRSKVKRHAKVLLDAIDLDSNPVSFEAEGLLSVCLQHEIDHLDGKLFIDRVSYLKRKLYDGRLKKRLLKNAI

SEQ ID NO: 11013 - protein, 330 aa, Lawsonia intracellularis
MLYNQPLPFSPETPWLAPIAGWSDLPFRLLCREHGAAVCYTEMISAKGLIYNNPGTESLLKTIPEDNPLIVQLCGSEASCMKDALTILLEKGYKWFDCNMGCSVPKITRTGSGASMMKNIDNSIKIAEAMIHTVNKKSIGFKLRLGWDEKHETWPILAKLLEEAGAGWITLHPRTAQQGFTGTANWEKLLELKQQVKIPVIASGDLLTASHGVDCIKKTHVDTVMYARGALKDPNIFTKHNQILKGKQITTTNSNSLFSMIMRHSYLACKYSSYDTALLKMRTIVPRYIRHLKGAKQLRLNIISCRTWSSFEDILQQFLKKEQVASCNEN

SEQ ID NO: 11014 - protein, 250 aa, Lawsonia intracellularis
MDLVGIPFIFPGVSGVRCLFQTPCLDKTKEGTYPNDLGNHFPADIEKKTFGRRRIMKQANISQLIEVEQVHGDVLLFESEPTFYKGNASGVTQQADGISTTKKGVGLLIRTADCQPILLAHKSGHYIAAIHVGWRGNRIEFPQTAVKNFCSYYKVEPSEVLVVRGPSLSPAYAKFTSFKEEWDEDFDPWFSIETETMDLWELTCFQLKSVGILSKNIFSLDLCTYLLPELFFSYRRDSKCGRQGSLIWIE

SEQ ID NO: 11015 - protein, 193 aa, Lawsonia intracellularis
MYMLDKDFVRNSCIIRRQALSSEEVHSASRIIAAKLFNDDVWRRARSVALYSSIKNEVSTESLLRQAWQEGKQVLLPRCILSGEPELEFALCRGWEELVVGPFGILEPDYKRCIAVSGKNLPELIIVPAVGLTSFGARLGYGKGYYDKLLSKSGWDRIVRVALIYQSQIVEFNPSISDVPMHGYITELGFIWI

SEQ ID NO: 11016 - protein, 666 aa, Lawsonia intracellularis
MSEKHEYFQTEKSISSNRHNSNNKPHAQYIQLTLKKDTMTQLEETIPVMAEHSNQKTASPTTHNHSIINEIETQDTQQTLESQPIVTHSLTLQQTSQATPEHSEQTSTNSWSENNISKKIPHNVYQASTKKLKTRSRSKNKNRTTKNSTLPVPTTNHLPALISKNSGLEQNSPEINKKMLISVIPGEQVEVAISSDGQLFEYFIEMNHHAKIRGNIYKGVINNIDANLQAAFINYGNTKNGFLQIDEVHPEYYLQPHEPTKLKKYPPIQKVLKAGQEILVQVVKEPTGNKGAFLTTWLSLAGRFLVLTPGQEQIGISRKVEDEEERTRLRELIKGLDPGSGLGAIVRTVSIGTSKTTLQKDLSFLKRVWREIRKKATTEKSPCLIYEEPGLATRAVRDYLADDITEIWVDDPETKQAIQEVTTLLFPRKTKLVHLYQNNNEPLWEHFKLNKQIIQVHSREVIMPSGGRLVFDQTEALMAIDINSGRIAGKTNFESMAYRTNMEAAATIAQQLRLRDIGGQIVIDFIEMKEPAHCRDVEKELQLAMKADRARHDVGKMSSFGLLQVVRQRIGSSAISISQETCPYCQGTGQRRNIEWQAIQTLREIHKKMQQTVTAGKHEYIHTLDQELGLYLLNNKRNRLIALEQEFGIHLDIRISLLQKIENSDL

SEQ ID NO: 11017 - protein, 197 aa, Lawsonia intracellularis
MKKVLIHLCCGPCSIIPIQILQDKGYKVSGYFANPNIHPLSEYLRRRESTEEVANKMGITMFWQDDIYNVSNWLETVYQKGIADNKGGLRCLYCYDSRLKLTQKTAQAHGFDAFTTSLFYSRHQRHELILKAGEKIEQESPNVQFLYQDFRSGWQKGIDTAKEWGLYRQNYCACIFSETERFQKKLNKLSNVTTPSY

SEQ ID NO: 11018 - protein, 658 aa, Lawsonia intracellularis
MEIPFLKDLVYIFCLSIGVLLICLRLKVPAIVGFLLTGVLCGPSALGLVENVHAVELLSEIGVVLLLFTIGMELSGEELARLKKPVFVGGTIQVVLTTGVMCGIAMLFGRTFPQSILIGYLATLSSTAIVLSILQQRGESEAPHGRLALSVLIFQDLAIVPMMLSIPLLAGQGEADPISFLLSAGRLVLILGGGWFLAYRVVPVLMRQVMRTRSRELFLMTSLGFCLAVAVGTAYLGLSLALGAFLAGLLLAESEYSMSVVEGILPFKDVFTSLFFIAVGMLLDVHFFIDHIGSVIALAVILITIKVLLAIPAMTFLGYPLRVAIMAAMSLGQIGEFSFVLAKSGVDHGFLDAIGYQNFLAASILTMVLTPGLISIAPKTARFIGKFFNHDNSQEKPLLTHQGELQDHLIIVGFGLGGKYLARTARETGIPYVILEMNPDTVRRLRDQEPIYHGDASHPLVLKHFGVEKARILVVVISDSAATRGITAAARKLNPSLHLIVRTRFLGEVPYLHELGANDVIPEDFETSIEIFTRVLGYYLIPRQTIEKFVHSIRSENYEMVRDLNFHGANLPSLTEELLSGLEVTACKVEAGSDMENKKLLHTDLRRKHGVTIVGIRRKENIIASPGPDEELLAGDTVFLFGTSFGISQSIELFRAQV

SEQ ID NO: 11019 - protein, 471 aa, Lawsonia intracellularis
MLFSPIRHKIENLKIIIVGAGEVGFHIAQRLSEEHKQVIVIDTSQEALRRVQENLDVQTIHGSGSSPSTLKTAGIETTNIFLAVTDSDEINITATLFAYALSPHIINLARIRNEEYASYPELIEKGPLNISMLVNPEEEVVRTIERLLMLPGAVEYGEFDGGRIRLVGIRVIDGPLIDQQLYHFRDIVNNDGIMVAAISRQKKLIIPSGIDTIQKDDIVYFIYKSKNQKELLRVLNKSHGIINVACIIGGGNIGVRLAKAFEQRDIKVKLIDNNEARCKKLADRLNSTLVLYGDGTDKSLLEEEHIDQADAFIAVTSNEEVNILACLLAKSLGVKEVVARVNKHAYLPLIEATGINHIVSPRLSAVNSILHYIRQGGVLSTLTVGGEAAEIIEVLVPETSNLLKKPISKLNFPHGALLLTILRENKSFIPSGQTIIEPGDRIVIICLREIMNRVEQLLTEPPLEESTSVTL

SEQ ID NO: 11020 - protein, 488 aa, Lawsonia intracellularis
MQLRSVFFIIGVLLICIGTSIIFPLLTSIYYNDGVAKDLALSLSVVIISGFLLAFICHQNNPIILSNQEGFAVVGLCWIIASIAGSLPYVYIGIPFTDAVFETASGFTTTGATILTDIEAIPKSILLWRSLTHWLGGMGIILLSLAVLPLLGVGGMQLYKAEVPGPSPDKLTPHMQDTAMLLWKVYGIMTLFQIILLYLAGMDLFDAINQTFSTVSTGGFSTKNNSIAAFPTPVIQWIIILFMFASGINFTLHYKLLLGLLPHYTHDTEFNLYTLLLIIGAITIGVLLIFYHIYPSNTLSQIEQIVRASVFQLVSICTTTGFITEDYSKWPQLAQGILLFFMFMGACAGSTAGGLKTMRIIVIAKVAYQEIFRLLHPHSIRFAKLGDKTIQKDVLSGIIGFLILYLFILLINTLALMALNYDLITSFSATLTCLSNVGPGLGSVGPVDNFHHLDNIAKWFLIFCMLLGRLEIYAILILFIPEFWKALK

SEQ ID NO: 11021 - protein, 220 aa, Lawsonia intracellularis
MKGILMGKTNLGIDQEGFPYIAIFAFSSLIFAILGWWLLAVLCLIGTIFCGHFFRDPERIIPTEANIAVSPADGKIIRIEPRQDPISGESHTCISIFMNICNVHVNRSPIKGQIEAIQYVQGHFLNASLDKAAKENEHCSYLLRDQDGKQWVVVQIAGLIARRIVCRTKEGDILNRGERFGIIRFGSRVDLYLPEEYTPTVNLGNKVIAGETILAKKNQE

SEQ ID NO: 11022 - protein, 249 aa, Lawsonia intracellularis
MQEKKITPKGVYILPNIFTLASLFLAFIGMIQVIGNKFHICALIILGSAVLDGLDGKIARLTNTSSEFGVQLDSLVDLVAFGVTPAFLAWKFGLEQFGKLGICISFLFIACTALRLARFNISTSILCKKFFVGLPCPTGGCSLALFILFTPYLPNFFNKILPHILLTLTFILSLLMVSRIRYFSFKEYGFLKTHTFSSMVTALLLFVLLLSEPAVMGFILCIIYLLSGPIYTYIFLPKRSYPLGKIDLL

SEQ ID NO: 11023 - protein, 216 aa, Lawsonia intracellularis
MIKENTIKKQRAACVLSLLKKRYPTFETHLVASNPWELLIATILSAQCTDARVNQVTPILFTRWPDPSALALAMLEEVEQVIRTTGFYKSKAKHIIETAKRIMYNYNGVVPQTMDELITLPGVARKTANVVLWGGFGINVGIAVDTHVKRISYRLGLTANKDPSLVEKDLMNLFPQSEWGAINHRMVWFGRHVCKAKNPLCTLCEMNTFCPHNGIK

SEQ ID NO: 11024 - protein, 106 aa, Lawsonia intracellularis
LVILVYITAPNENEAEYLATMLVKQKVAACVNIIPKVQSVYLWGNSIHKDNEVILLVKTIESHFNKIKEIVCSIHSYDTPCIIALPIILGENKFLAWVEDTVKEEH

SEQ ID NO: 11025 - protein, 313 aa, Lawsonia intracellularis
MIYIAGSLAYDKIMNFPGKFEEHILADKLHVLNVCFLINGLIEKRGGTAGNIAYTLSLMNEKSYILSSVGTDFENYEKFLSSLKLPLDGIRKIPDTLTAVAYITTDQSNNQITGFYPAAMNFPCLYDLPQLNKMHDWAIISPTNIEDMQKLPTIFYEKQIKYIFDPGQQLPVLSKDDLLNAITGSSILVTNDYEFEMICKKTDKTRAELRSLTGAIITTLGDQGALIHTDKEISIGIAVPNKIMDPTGAGDAFRAGLLKGLIHNLDIVESAYLGSTAASFCIENSGTQEHTFTYTTFSERYKKAFNEYPTLSW

SEQ ID NO: 11026 - protein, 574 aa, Lawsonia intracellularis
VIKKDILYQDITLDRNNNNNKEKKIAITNSHQIYNKNNVLTNLLSLDKEIITLLAKRAHLLSKLPKTGLSAHEKQLRISWEKSVTMLSKDPQFTRQLFTLIQGIEVIPEAIEQISAFCLSPKNKPVNIVLPIPSCFRTTQLNIAMAVCSNSEGTLQHVLLNDPIIECIKAFNQLGASLHWEESGCIICSNPNFTRKHYKKSIQIDTVIHIGNDTLSLYLLIFFIATCPARVKFIGKNSLKLADFSPLRKFLPMIGSRLINIIPGQDGLPIRIESSAILPSEIIIPTDLPVDAVIALFIAATRWDKELLIDIKEHPNVTYILDKIIPLFEQWQIPFQKIIFNKQVTAISITPNKITFPENPMIGTYVPGTATLLALPAFVGGTVTLKRQYQQHTDICLLIEVLTQFGLNITETADTICCTGRQIGLTSSSLNIKTLPKELFPLILTLLCIPLLKSETNLLPELPDYVDESILDSYLAQLGLVRMGSKVKLISPTQTPWTSPSDTWGLAISLAAFLRPQIKLSNPGCVEAIYPNYWKIYNKLPTGDYTMQSSKKYSPTPVELSETKKVNRRRIITE

SEQ ID NO: 11027 - protein, 277 aa, Lawsonia intracellularis
MGKSSPSNPPCILTIAGSDSGGGAGIQADLKTIAILGGFGLSVITALTAQNGLGVTGIHTPDPSFIELQLNTIYKGFFVNVLKTGMLFSVPIIEIVKNIIKKQQTLAVIDPVCVSQSGYQLLEHTAIDALRTHILPLAMLVTPNKPEAELLTEMQIESEKDIYIAGKRLIDMGAKAVLIKGGHFYKNNLVTNYVDWYIEKNSTNPIPLSQPAIKTKNNHGTGCTLSAAIATYIGLGLELKKAILQAQTYLNYCLKFSYTPGKGIGPPNHTAWLNRKL

SEQ ID NO: 11028 - protein, 271 aa, Lawsonia intracellularis
MILTYWGNIFDHFFLGIFSFIIFSCCGCESNTSLNNLTEAYQYIEKKEWSAAERYLELYLHEEERLDLRFEAWNKLLEVGGYLTYNDSWMISCLEEMYSEFEDQPEQIKSVLWRLALAYDRIRNYNKSMEYWEKLFIQPGLSVEQQANILRKLASSSVKIHRFDIANNYLKNCLELPLSSTNRLECLLDRADVASSMGLFDEGASYALLVLESDEASIELKGKAGFILADIKEQQGNIQKAIELFKSIREYYPNAMVVDQRLQLLQAKNKH

SEQ ID NO: 11029 - protein, 820 aa, Lawsonia intracellularis
MSQTEHHISIEQEMRKSYLEYSLSVIIGRAIPDVRDGLKPVHRRILFAQQELGNSYTRPPKKCARIVGDVIGKYHPHGDSAVYDALVRMAQDFSMRDPLEEGQGNFGSIDGDAPAAMRYTEVRMSRLASEFLSDIDKETVDFRPNYDNSLEEPIVLPTKVPNLLLNGSSGIAVGMATNIPPHNLGELCNALLKIIDDPDVPIDNLLNIIHGPDFPTGGFIYVGQGLYDAYTKGRGTVKVRGKVEIEERKKGAQSIVIREIPFGLNKSSLVEKIAILVNERKIDGIADLRDESDRKGIRVVIELKKGVIPEIIINALYKFTPLETSFGINMLAVVDNRPQLLTIKSALTYFLDHRREVIVRRTRFELNKAEARLHILIGLIHALDHIDEVVNLIRSSSTPAEAKIRLIERFSLSEIQAQSILDMRLQRLTGLEREKLEEEMHELQTKIAWYESILGDTKILWGVIRDEVTGIKEMYTTPRRTEVIRETLTNIEIEDLIPDDDVVITLSRRGYIKRTNLAIYQQQRRGGKGVAGLHTSEDDFVQEFITTTNHQFLLLFTNKGRMHQLKVHQVPEGSRTAKGTHIANIVPLEKEEWVTTILTVREFSDNKFFLFATRKGMVKRSSASYYARSRRTGLLAVGLREDDELIMVKEVTNNDFIVLATAEGFAIRFSCEDVRNMGRGAAGVKGIALRPGDSVVACLILQEKQDTPAIMTVSNLGYGKRTSIDLYRVQTRGGKGIINFKVTQKTGLVIGAKPVSDDNALVLLTSTNKIIRMSVDEVRSAGRATMGVRLVKLDDGAYVVGFDTVDGTVDDSCDDATINT

SEQ ID NO: 11030 - protein, 799 aa, Lawsonia intracellularis
MASNSEIIPKDYTADSITILEGLQAVRMRPAMYIGSTDTRGLHHLVYEVIDNSIDEAMAGFCTRIDVVLHLDNSITVRDNGRGIPVDIHPKEGVPAVQVVMTKLHAGGKFDNDTYKVSGGLHGVGLSCVNALSEQLEVTILRGGYRWKQKYSRGVPLENLQRIGESDNHGTTIRFKADEEIFETTEYSYETLKRRFEELAYLNKGLEIHCTDERTSETHLFKAEGGIHQFVKDINTGESILHSIISRESIVEGVMIDFALQYNAGYKENTLTFANNIRTKEGGTHLAGFKTALTRAINGYIKGQPDLSKKLKGQTLSGDDVREGLTAVLSVKLPNPQFEGQTKTKLGNSEIAGIVGGAVYTSLDTYFQENPKDIRCIIDKAIDAARAREAARRAKELVRRKGALFDNALPGKLADCQSKNPAESELFIVEGDSAGGSAKQGRNPNIQAILPLRGKILNIERTRFDKMLANKEIKALITAMGAGIGEEDTDYQKLRYYKIVIMTDADVDGAHIRTLLLTFFFRNYVGLIERGHLYIAQPPLYRVHNSKSEKFIKDDPSLNDFLLHRVSSELEIQTESGKLLKGSDIITTMKQIESISQRTKDAELAGISENLFMLLITSPKKLTSDVLSSLEEIQLYLNTSGYNITVENESHEDGDRLFTIFENKNGHKTRIPADFFASKIYSSTWDVMDSLLTMCGGINFIVFHSGTSHTINDLFKLYQFTLDEARKGINIQRYKGLGEMNPEQLWVTTMDPQNRTLLQVTINDAEEANETFEQLMGERVEPRREFIERNALNVRDLDI

SEQ ID NO: 11031 - protein, 383 aa, Lawsonia intracellularis
MLLYINKEHIIDGLQKVANIIPARSGAAYLRTLWMKAEHSTLTIMATDANIEFIGNYEADIKETGLVGVNGRNLIDLIRRLPAKELCLRFDSTSGTLILEQERRTYKMPINDPIWFQPLTLFPSEESVVWSADFFQEVIDRVSFCISDDEGSDAISCLYIQPSNDNYINVCGLNGHQFALTRFINNELSEKIPSEGILIPKKYITELRKWLGETEIEIAITEKRFFARTIDSKETISVPRAIFTYPDYTAFLTRLTGDNMSFLKLQRKDCLESLDRISIFNTEGDRCTYFDIKENELILSAQGQDTGSANEYLDVTYTGNINKIAFPTKSLMEIFNHFESPTITLAMSSVEGPCGITGDEDKDYTVIIMPMKIVEQNYYTEEV

SEQ ID NO: 11032 - protein, 440 aa, Lawsonia intracellularis
MKEQLRRSLLASQKNFCSNEELQSWFDPLTIKHSENPPSIYVTFPHRFFGSWFANTFQKIFEETSYELWGYGVNFYYDEVTTKEPLYYPIKQNKSTQPTNISQHFDNFIINGKHSWIISIIENILCSVSENILKNTSEEITQLLVLFGKQTTGKTHLLRAIANELSKIPSCSFKYTTTDELAFSLNKEPLFLFREHIQSHHIILIDDFQRVSSYPELQLELTILLDYYKDNKKILIISGTDHPLTWNVSKEIYSRLEVGLWGELPEPDLDIRFRYAQQLSKEKKYILPKEQLLIISQHCHSLRCLSGILHRTIAHKTLLNRELSEKELITLIKQTGEITSISPQLIIMLVGECYGFSANDIISESRQQQLVLARQVAMYLCRELLGYSYPAIGRLFGGRDHTTVLHSVKKIALLQDNDRVIHTMIHELIQKCKNVKNDER

SEQ ID NO: 11033 - protein, 444 aa, Lawsonia intracellularis
LQKYYVKTYSTGAIFFIFFLLLIGGYFFFLKHKEIFYSHGKTNEKIFLEERSTSYSFLNSKDNNTIIKKKQDAQQVHIVSGVVKKGQNSFEIIGTHVSPENFYKIVKASEQAHSLKKLRVGQPYTLFKSSSNGSLIRFEYEINQTKKLVIESNNSEFKAYLQPIAYDCQLSCISGVIHSNLFDSIIATGESPLLALSMVDILSFEINFIRDLRVGDSFTILVEKLFKDNVFKGYGKILGVTFYNNGSCYEGYRFIDDNGVEQYYNAEGKSLKRVFLKVPLDFKRISSKYSLNRVHPIYCDVRPHLGIDYAAPFGTPVKSIGNGVIMKAGWGNGFGKMVIVKHKNNIESMYSHLSGFSSNLKVGTKVKQGQVIGYVGSTGLSTGPHLDFRIREKGQYINPEKIFNPRMGPVSPHQLEKYKDFIVEIKSYMDGNRNPEEYTPDSFL

SEQ ID NO: 11034 - protein, 366 aa, Lawsonia intracellularis
VSSITESDFLLSSYMFSLPKTQIAQYPYERGKSRLLVLTKKNSTIIHTDFSKIEHYLPNNSLLIANNSRVFPARIFCSYDKRNIEVFLLTPISFLEIQAKSSDEHYGAWSTAIGECLIRPAKRVNIGSKLYLQQELEIEVLKKEDFGRHIVKLCWKGSLSNIFFSYGDIPHPPYIHQSNKVQDKERYQTVYSRLDKLGSVAAPTAGLHFSETIRNKLQKNGISWAEITLHVGYGTFSPVRCNDIRKHIMHSEFVEVPETTVQAIKKARFEGRPIFAIGTTVVRALEGVSTICGSLQPYTGFINIFISPGYKFSYVDGLVTNFHLPGSTLLMLVSAFTKRSIMINTYNKAIELGYRFFSYGDAMLII

SEQ ID NO: 11035 - protein, 353 aa, Lawsonia intracellularis
MEQKRILIKGNEAVAYAAVAAGCQCYFGYPITPQSEIPEMLSHLLPESGGDFVQAESEIAAVNMLLGAGACGVRAMTSSSSPGISLMQECISYMVGSEIPGVIINMTRGGPGLGSIDASQADYFQSTKGGAHGGARTFVLAPSTCQECYDMTIKAFSLAFIYRNPVLILGDAMVAQVKEPVVCWKPEKKLEDNADSWRLNGNKGRSSRLLRSLNLKEGGLAEHNNNLLRKYLSMQQDIEAEEYFIEDAKLVVVAFGSIGRIVRSAINTLREQGYKVGLFRPLTLFPYPSSMLESLAKQGKNFFVIEQNGGQMVEDVRLAIRHYTDANVHLVPVGVSIGAEDLLQPISEFFRRI

SEQ ID NO: 11036 - protein, 267 aa, Lawsonia intracellularis
MSVVPIEIEEPSYIITEENAFPISPLLKEEITHYCAGCHHGIAHRLITEVLSEMALAGETIGIASIGCSSFIYDYIDIDWVEAPHGRASAVATGVKRALPDKIVFTYQGDGDLGAIGLCESIHAANRGEHISVLFINNTVYGMTGGQMGPTTLVGQKTTTSPKGRNASKEGAPLRVAEIMAGLDGVAFSARCSLHSMKHVLAAKKAIRKAFDIQYKGIGYSFVEMLAGCPTNWRIDPRAANKYIADAMIPVFPLGTFKDIVEDNKRG

SEQ ID NO: 11037 - protein, 180 aa, Lawsonia intracellularis
MVSYHNVVIAGFGGQGVMLIGNLLAQAGMEAGRNVTYFPVYGAEMRGGTANCTVVISEELVGSPVVISPLSTIIMNQPSLDKFQHRICADGVQIVNTSMIEKEAIDPSKKTVCVPANELADKIGNIKGANMVALGAFLKATGCLSLDVVISALERVISSHYHHLIPSNIAALEAGYTFYA

SEQ ID NO: 11038 - protein, 430 aa, Lawsonia intracellularis
MEFVLESISPTKKKLTISLTPDEVNTALDSVIAQYKKDLSLPGFRKGKVPNSVVFKKFSEEITNKATEETLKIYIKEIFQKEHIKPLCNLLTEDTDFIRNESFSSTLTFEVLPEITFPNYEGLEVHQDVVKVTDEEVAELLKNIQLAMAELVDVKEDRSPQNGDVVDVDYKGFENGSPVTDVSGEHFVLTLGQRQALEDFEQLVKTAKVGEEKVGIVNFPRDYAHKGLAGKSIDFHIKLNSIKTSILPELDADFAKKAGYEDIDKLREAAKVQLEIKKKQNAKSNAMKKLINGLLEQVTFDVPETMLETRIERILGDHNIRSQQTVQVQTGEERSESEEELYNNAKVEALAVLRPQIFLMALAEKEKLVVMEQEVERALYNMAIRARQDYNKFRDAYYRSGLVYELQDHLLAEKAMELIYNKANVVEVEQ

SEQ ID NO: 11039 - protein, 209 aa, Lawsonia intracellularis
MDDIFNMTVPIVVENNGRNERAYDIYSRLLKDRIVLLGTEVNDQVASLICAQLLFLESQDPEKEIYLYINSPGGSVTAGLAIYDTMNYITPNVATVCMGRAASMGALLLAAGEKNMRYALPNSQVMIHQPLGGYQGQATDIDIHAREILRMRQRLNEILMEQTGQSLEKVAQDTERDYFMTAEDAKAYGLIDKVLVSRKDLDIEHEKTE

SEQ ID NO: 11040 - protein, 417 aa, Lawsonia intracellularis
MSRNDEKNPQLLCSFCGKGEYEVKQLIAGDGVHICDACIASCNEILVRQELETVEEQLLTPQEIKERLDEYVIGQEEAKKILAVAVHNHYKRVFYAEKISSEHGDVELEKSNVLLVGPSGSGKTLLAKTLAKILRVPFAIADATTLTEAGYVGEDVENILVQLLQNADYDLDTASKGIIYIDEIDKISRRSDGPSITRDVSGEGVQQALLKIIEGTEANIPPKGGRKHPQQEFIRMNTSNILFIVGGAFIGLDKIVEQRIRGGSMGFGAKVSGKKERPLGQLLEQVHPNDLVQFGLIPEFVGRIPVLTHVDDLSEEDLVRVLVEPKNALTRQYQKLFELDNVTLRFTSDALKAIAHKAIERKTGARGLRNVMESIMLDIMYKLPSMVGVKECVINDVVINTNGEPLYIYDSEVQVAL

SEQ ID NO: 11041 - protein, 817 aa, Lawsonia intracellularis
MHTLGDEHKQTLDDEYVELPLMPLREVVMFPHSIIPLFVGREASIKAIEHAVTNYDRKICLVVQREPEVEKPSLESLYPIGVVSRILQFLRLPDGTIKVLFEGLYRVHWEHLDSEKSIESFHKVMVKAVKESTASFLESEALVRATHEALEEYTKNNKKITQEALAAISGLRDPGRLADAIMPHLKVDYIEKQSVLEQLDPVARLEKVYELLSGEITVSTIERRIKSRVKTQMERNHREYYLSEQIKAIQKEMGRDDDPQAELADLEKKLFEKNMPEYAREKGLSELKKLKHMSPSAAEYAVVRNYVDWVYELPWNEVKETEIDISNARQILDRDHYGLEKPKQRILEYLAVQKLTGSCKGTILCLVGPPGVGKTSLARSVAKATEREYVRLSLGGVRDEAEIRGHRRTYVGAMPGKLITALKRVKYNNPLFCLDEIDKMSADFRGDPASALLEVLDPEQNSTFNDHYLDLDYDLSQIFFITTANSLQGIPAPLKDRMEIIELSSYLEVEKKHIVKDFLLPRQVIKHGLKPENIRISENALTEVIRSYTREAGVRNLEREIAALCRKVAIKLVEKNDMDKTISITRQNLGSLLGVKKYRINESEKTPKIGVVNGLAYTSVGGVLLNVESVIMPGKGNVSTTGKLGEVMIESARAALSYVRSRSDMFGLRPDFHSEVDIHIHFPEGATPKDGPSAGIAITTSLVSALLGIPVRHDVAMTGEVTLRGRVLPIGGLREKLLAASRAEVTTVIVPRENEKDLKEVPEEILKALHIQFVEHIDEVLPLALISESEDIFSEIHTDEPFTTSLRRHTVEITTAQ

SEQ ID NO: 11042 - protein, 128 aa, Lawsonia intracellularis
MFKEKITTMSQALNVLRVLDDNTSLGKLVCSGIQQLIKLAEPMDKTIPKNCPFKQHFFHTLNNLPLCDEGHWLELFEDLAYFFKQYYTSFPDSYIPIECQQVMKYFESCGEWTPQDGKLISIGYWATS

SEQ ID NO: 11043 - protein, 329 aa, Lawsonia intracellularis
MGENKTHGILILPFILSILGILFCFWNLLAPSTVPCISSGCNLYQGGEFGGLTFWWFGILGFGLLAILAVIGRAKLGLFIAGVGLCIDIILFITMVMTLPCMACMFVGLLLALTFYFFRKRVFLAESDSEDVENNRSLILICWWFFFLLNIILVIKGAVPPWALPVGDTSSSSSVAIYFSPSCTACQKLIMNLAESEVQKSSWYPVAEKSSDIAVIAKLEQLLKSKKFTLAEAFSLSISTQPLTTLEKLSPNHVLLQLKLWINRSHVLKDGDGRMPLLEFRGTPAMLLSSIKTNHLPVVGKDDDMLSLEFDKVGICGEGDAPNSQSCTE

SEQ ID NO: 11044 - protein, 212 aa, Lawsonia intracellularis
MSFYIKELFYTIQGEGVQTGRPAVFCRFSGCNLWSGKEKDRAIAKCQFCDTDFLNADFGILDSEEQLVANILQTFPQNNYTHPSYKPYVVFTGGEPSLQLNQVIINLLHKYHIEIAIETNGTIPLPKHIDWITVSPKEGNELVTTVGNELKLVWPQQNCDPEKYLTLEFDNFILQPKDDKNLSNNIQICIEYCMKHPYWKLGLQSHKWIGIR

SEQ ID NO: 11045 - protein, 238 aa, Lawsonia intracellularis
MYHLNQKALLLFSGGQDSGTCLGWALSNFSHIITIGFSYGQRHSVEMQCRTNIRNKISKLSKIWEQRLGEDYIFSLDIFSQLGETAITSELEIVFDKQGLPNTFVPGRNIFFLTIAAAFAWRNSIRHLIIGTCETDFSGYPDCQDNSIKATQLALSLGLGEDITIHTPLMWLTKAQTWELALHLGGSKFVDLIRNETHSCYLNDHTTSHEWGYGCGTCPACKLRKNGWETFLMKKRAN

SEQ ID NO: 11046 - protein, 457 aa, Lawsonia intracellularis
MDQDACTHSAALILAAGKGTRMCSNKPKVLHTLLGEPLLFHVISALRPLFGSNIWVVIGHGSSLIQSICSDLSLNFIYQEKQLGTANAVSIALPVLQQSRIKRLMVINGDMPLITSDLLECIIKKSDKTDFVFATLKLPLPNDYGRILRREGKIYSIIEAKDIEPSLQHDTTVEVNAGLYYFSLEVVDKCLPMIKNENKSQEYYFTDIIELAVENGYLVDSIYFEEDWHFLGVNTPKDLSYVESIQQAFIIEKLLQSGVIIHSPESVRISPFATIEPGVEIYGPCEIYGASYIASGSIIYSHSWIKNTTISHDVCIYSFCHLDTVIIKDKCSIGPYARLRPGCHLEEQVCIGNFVEIKKTQLGKHVKINHLSYIGDAIVGDESNIGAGTITCNYDGENKHHTFIGKKAFIGSNTALVAPLTIGEKSLIGAGSVIIRDVPENMVSIARGKQKNFSKRK

SEQ ID NO: 11047 - protein, 520 aa, Lawsonia intracellularis
MSFILVLCTVSSLFVGGGTGIFLYKKVSKKYIGDAKELAIRIVEEARKEGQAQKKEILLQGQNEIFNQKKEFEFDFKQREKELSIKDKKLQVQSERLEERLERAAEKEHEILKVEKELSIKERNLLTLEEQLKSRIDEQEKQLQKISGLTVEEAKQSLFEEVKNRSRHESAKMMRLIEAEAVETANRKAKEIIANAIQRYAGDYVSEHTVTAVTLPSEDMKGRIIGREGRNIRALESATGVDFIIDDTPETVVLSAYSPMRRQVAKMALERLIQDGRIHPARIEEIVRKCEEDLAIQVREIGEQATFDIGVYGIHPELIRILGQLNYRTSYTQNVLRHSIEVASLCGMMAAELGVDIKKAKRAGLLHDIGKAVDHEVEGSHAIIGAELAKKFNETEEIVHAIEAHHEEKGKPETALAILVQASDCLSGARPGARLELLESYVKRLEHLENIAGEFEGVSKAYAIQAGREVRVMVDADSIGDDQTYLLCKDIAGRIEESLTYPGQIRVTVIREHRAVGYAK

SEQ ID NO: 11048 - protein, 252 aa, Lawsonia intracellularis
MRCRTLMRIATIILHYGNPKLTEKVYRALCEKTSQSDIVESSIFVFDNASQVPYPNAWKRSSSNLYWAGALSYCFLLVKEMGFTHLWFLNNDITFIGNGSYLAKAYASIQRIERATGKLVGIWSPSLMYNSYHPQMCNRKDFSYSQVKLIDGVAALYNLTCLDSIGGIDALDNLYGYGVDLWISIRSDRKGWLLVVDHSMVIRHIQHGSAKNIKGFIETAAFSEEVFFRKRLGIEWKQQIESMKEQYSSFTF

SEQ ID NO: 11049 - protein, 152 aa, Lawsonia intracellularis
MVKQNINDVFIAGLRKGWQMGTMNLLPNVIMAFVLIQALNIIGLLKIIGELFAPIMSIFSLPGEAMTVLLTSWLSAVGGVGVAASLCTEGILNSTHISILIPGIFLMGGQLQYMGRILAVAGIEPSHYKVLFLISIMNAAMGMLTMKYIIIH

SEQ ID NO: 11050 - protein, 225 aa, Lawsonia intracellularis
MEKNTHIPQIDQSKKIKISSYIILILVILFFSGYFSKFQNWLGIMDFSRFIGKFGTIGDSTPTTFVGLGGSGACQGFLFSLSLIPGIMLALGIVELAEHLGALYAAQHLLTPLMKPLFGLPGISGLALISSLHSSDSASVMTRELYDKGFISNNERTIFGAFQFSAGAAVTNYLTTGLALFPFLSVKIIIPLCVILFYKVVGMNVIRLYLILVTQKNVTIEQTHG

SEQ ID NO: 11051 - protein, 362 aa, Lawsonia intracellularis
MFEFNIERQSILINGEKFSKTNILKNNKNEKIQSELFQFLKEWFNQSITIQVSTSGSTGKPKTLHVKKTCMLQSAYLTCSFLGLKPNDTALLCMPLKYIGAKMVVVRSLLAGLNLLYVTPSSRPLKQIKSSPTFAAMTPMQVCTTLEYKKDTTYLKNIKHLIIGGGSIDTSLSKKLADFPHAVWSTYGMTETLSHIALRKLNGVNASEWYTPFKSIKVSLSPEGTLVITAPNICKKPLVTNDIAEVNECGNFRIIGRKDNIINSGGIKIQIELVENLLKKFILQPFIITSIPDHKFGELVVILVEKKVCDYLAICKANLPLYWCPKHVIQVQKLPKTDTDKVNRAKAKELAYKIFSQQFNSK

SEQ ID NO: 11052 - protein, 273 aa, Lawsonia intracellularis
MSNYAWESITTYKEILFQYYKGIAKITINRERYRNAFTPTTTFEISNALLYCRECQDIAVVIITGSGDKAFCSGGDMNVKGRGGYIDENGVPRLNILDVQKQIRFLPKPVIAMVNGYAIGGGHVLHIVCDLTIASENAIFGQTGPRVGSFDAGLGSSYLARIVGQKKVREIWFLCRQYTAQEALTMGLVNKVVPLKDLEKETVAWSEIIMQHSPLALRMIKAGLNAELDGQIGIQELAGDATMLYYLTDEAQEGSNAFLEKRKPNFKQYPKLP

SEQ ID NO: 11053 - protein, 144 aa, Lawsonia intracellularis
MKNSQQHNIITYNTKYKNSLIGHLGILFHESKLGTVIASMPVTNHTSQPFGYLSGGASLALAESIAGHGSYLLCLENEFPCGIQVSGNHIKNVPIGKLVKGKGQIIHKGNTTHLWHIDIVNEEEEIVSTARVVNHIIKSNSNKG

SEQ ID NO: 11054 - protein, 129 aa, Lawsonia intracellularis
MKRLVIVLSIVCVLSAAESVFALNKKLDIMNGSQMDIYTLKVSPTNANQWEENLLQEETLKNGDKAMVEISRTENAEAWDITVTDKNGNESSWIGLPLDKAGDVTLLPDGQYLTDKDMTIDNMKKVMKK

SEQ ID NO: 11055 - protein, 237 aa, Lawsonia intracellularis
LEVKMEILRDGTKGVASSVTSIFMRYVYWWMTIGLLVTAGSAFYVANSPALLQTLFSNTLSLVILAIAVIALPLVLSTMISRLSSTAATLLFILYSLLMGAFLSSVLVVYTGTSVVQAFVTTAGTFAAMSIYGTVTKRDLTSMGSFLTMGLIGLIIAMVVNIFLKSPMMEFIISAIGVLIFTGLTAYDTQKIRTFGENAPLNDSLAIRRGALLGALTLYLDFINLFLMMLRLMGDRR

SEQ ID NO: 11056 - protein, 336 aa, Lawsonia intracellularis
MFEIPLLLILIIIIALIFDFTNGAHDCANAIATVISTKALTPQTAVLMAAVLNLLGAFLGTEVASTLGKGIVNTEVVSGNQILVLAALSGAITWNFITWYYGIPSSSSHALIGGLIGSSIISAGFTSLNILSILQKIILPLFLAPLLGFFTGFSFMTLLSFLFAKTHRKKLTKKFTHLQILSAAFMATSHALNDAQKTMGVITLALFIFNKIESITVPFWVKVVCAIAMAAGTAVGGWKIIKTMGNSIFKLEPVHGFAAETSASAVITIASILGAPISTTHTITACIFGVGSTKRLSAVRWFVAITLVKAWMITIPASAIIGIAFFYFFSFIGLSN

SEQ ID NO: 11057 - protein, 211 aa, Lawsonia intracellularis
MLARFMPQSVPFFELLAKQGTILQKQIHQLIIINEQAKNNHPIEIQTLQNTKEEISQLYNTITEHLSRTFITPIDKEDIHAINLGQLYLSCTCYELGTLFFYCRIPNSIPSSLELLIANEQNMIDDILSMIKELPKKTDISSNLREIREKKENGAILLVMGLKKIQDFNFTDISTTKELFILSKYYDKLALAMEQTLNLADILEKTMIKYV

SEQ ID NO: 11058 - protein, 541 aa, Lawsonia intracellularis
VGANNFFFIVSEVTLVRLDQFLYNNLCTHGVSRERLKKVIVSGGCKIDDKVCFSPSTRLKVGMHIFIQLPEVVSALLPEEGFLEILFSDEHLAIINKPPGLTVHPAPSCQESTLVHRLLKYFPKLIEQGGLRPGIVHRIDKDTSGLLCIALTEDTRLKLSKIFLDRKINKEYLALVHGVPSMEGYIAVPLGRDPKTKVKVAVNPKGKPAHTEWRVLHRGKNDVYSILALTIQTGRTHQIRVHMKHIGHPLVGDKLYAGGHVNKTFQCNRQMLHAWKLSFEHPITGKKMNFLCPPPKDFLDTVSLLEQEPIRIVITGVAGSGKTTVLKYFEQHSDIIIWSADKAVEKLYSPGGEVWSILQERYGDRFVPDKNRSVDKLRLLSALNGETEPLLDIRDLNYIVHPIMLEQLSKFWGEAFYKKYKYAIAEVPLWFEVDHIISQLVKENRVSSNIRPNFVIGVSCPENIREKRLKEARCWSTAHKTTIDNWQFHQDMKLKLCDYIVDNSGSEVQLKNNIQDIMMLIEAKVTSFQDDFLQFLQKIIT

SEQ ID NO: 11059 - protein, 261 aa, Lawsonia intracellularis
MARVIAIANQKGGVGKTTTAINLAASLAIMEKRVLLVDCDPQANTTSGLGFSVNMLSHSLYSVLFQTKPVECAIMSTVSSFLFLLPSGTELVAAELELVDKIGREYYLSELLAPLEKKFEYIILDCPPSLGLITLNALCAAKEILVPLQCEFFALEGIVKLLQTHDQVKKRLNPKLSLLGIVLTMYDGRNKVTRQVQQEVIRCFPNHICETVIPRNIRLSEAPSHGKSILHYDIKSKGAEAYLELAREIVMRKVKTDVLSI

SEQ ID NO: 11060 - protein, 319 aa, Lawsonia intracellularis
MATQERGLGRGLDILFGNTSPEVEQDHIKKHSKDGLVLPSITKLPIAILRPSSSQPRKSFDKNALEELVLSIKNQGVVQPILVRPYREQSSIRYEIVAGERRWRAAKLAGLVDVPVYIKELNDEDVLTIALIENLQREDLNPIEEALAIESLRKKLSLSQDELAHRLGRSRSAIANTLRLLHLTPEVQEGLCNHTISSGHARALLALSDMELQQVLYKAICCNQLSVRDVETSVTYWKKNGVLPPSISGITKDTVKVKQKERSERLKNVVNTLRFNLHPKVTISGSECMGRITIPYDSQEQFTTILLKLGINASDTIDT

SEQ ID NO: 11061 - protein, 345 aa, Lawsonia intracellularis
MVDSHSAVMVKSDFVRLLNDKPVLVVGDIMLDNYLIGVSDRISPEAPVPIVKIENEKQSLGGAGNVARSIAALGGKVTIIGAVGQDQSGEKIQDLLSTRGILSSIITFANRQTTVKTRVMAHRQQMIRLDHEESTSYNSKELAMVLSNFEKYVSQHEIIILSDYNKGLVSKEFMLGFQDILLAKNPNAKVLIDPRPCNIMYYALCKNIFALTPNTKETGECAGGMATSSQPELLAAGHTIMKLLSTKHLLTTLGDSGMALFLSPKKIWHIPTVGRDVFDVTGAGDTVIATFGLALSAGLDPLISAILANYAAGVVVSQVGTATVSPDELEEAITSLPQPKLAFWN

SEQ ID NO: 11062 - protein, 397 aa, Lawsonia intracellularis
MLLYIHIPFCKTRCYYCSFFSKPLDTSSIDGQQKLQTYFVTLKNELSYWGNKLQKPTIETIFFGGGTPSLLSPQYIYKILEHISQYYRLTSKIEITLEANPESLTTLSLIKEYLMAGINRVSLGFQAINNKQLHHLGRTHNIIDAIQSYNMLRDALCTNINIDLIWGLPNQTVQKWLTTIKYVAELKPNHISSYNLTLEPGTIFNKQYVNKKLTLPSEEEQITMFFQTKTYLEEKGLLQYEISNFAQPGYQCKHNNGYWEGKDYLGVGPSATSTLNHYRWTNPADLSLWSLLVEKKKEPPKEYIDNKTQVLELFMLRLRTTKGLNINEYNTIAKNNFIDSYKNLIFKLEKEQLIKIDSNYLKLTPLGQLVSNSIIKEFFVMYQLILNTKKSKVANSI

SEQ ID NO: 11063 - protein, 315 aa, Lawsonia intracellularis
MQEKNVFNWLHKDLLDIDQLSQTDIFNILNTASSLDETNSRVIKKLPTLRGKNIILFFAEPSTRTKVSFEIAGKRLSADTIGVNASSSSIQKGESLKDTALTLQAMSPDVIVLRHSSSGAALFLADLLECSVINAGDGWHAHPTQALLDVFSLWKVWGNHFHGKEVLIVGDTAHSRVCRSNVTLLNLMGVKVRLCSPRTLLPSGVEHWPVEIYTDLHQAICGVDAVICLRVQLERHKKSFFPSIEEYAKRFCLTPKHLMSAKTEAKVLHPGPFLRGVDLASSLIETPQSLIFDQVSAGIAIRMAILFLFLTCNDL

SEQ ID NO: 11064 - protein, 423 aa, Lawsonia intracellularis
MSSLFLYNAYYDGKLVSLEVRDGKIITLKEGEQNSTSSPIDLHPVDAKQKHLFPSFIDVHTHLREPGYEWKETIATGLAAAAHGGFGSVLCMANTNPVNDSATVTCKILESGKYAFPNGPYVYPIGAATIGLKGEQLSPMHELAEAGCIAISNDGLPIKNTELFRRILEYASDLGLIVIDHCEDPYLACDTHMNEGFISGKLGLSGQPDIAETLQAIRSILLAEYLNVPVHIAHVSAKRTVEAISWGKSRGVKVTAETCPHYLLLDERAVIGYNTNAKVNPPLRTQEDIMALREAIKTGIIDMLATDHAPHAAYEKEVPFDKAPNGFTGFDVAIPVMYSLVREGVLSESDLIRLWSNNPAGVFNLPINNFKPGDPANFFLFDPELEWTVSKENLYSKSWNTPWLGETLKGRVVMHWINGVKVV

SEQ ID NO: 11065 - protein, 257 aa, Lawsonia intracellularis
MRIIRVQYNEFSFYAALGAENTIQCLHSPLGLNEPIPLSKIKVLPLVSPTKIICIDINYHEKAQELQQPIPTNPTFFFKPPSSIVGNGQPILLPTNIGRVVSEAELCIVIGQTCYKVTPEAASNYIFGYTCANDITAKDIQQQEYTTSHAKAYNTFCPVGPWIETDVPNIENLQIRNSINSELGQVSTTADMIFPPLELISFLSNIMTLNPGDLILTGTPKGSLLISDGDIVQTSIENVGILINPIEEYLPMETIVQ

SEQ ID NO: 11066 - protein, 457 aa, Lawsonia intracellularis
MLQRNFHIITFGCQMNTNDSFWLSCSLQKKGFQEVSLEDASIIIINTCSVREKPEQKVYSILGKIRHATKNNPDSFVVIAGCVAQQLGATFFEKFPQVRLVSGSDGIAMAPDAIERLYAEPDLKLNLTDFSEYYPEREYAFSKLTLSNNNTLALMAYVNIMQGCDNYCTYCIVPYTRGKQKSRSVQAIVEECQQLIDSGVKEIVLLGQNVNAYGLDKDKNSPANGVNFAMLVHTIASLPGLERLRFFSAHPKEFSSELIDLFGEFSTLCPRLHLPLQSGSDKILRRMGRKYSMDEYISIITKLKKVRPDIALSTDFIVGFPGETEEDFLQTLQSINTIKFMSSFSFCYSDRPGTRSSTFSNKVDHEVKIKRLEQLQATQLEHSTSWLKSRVGVETTVLLEKVSRKKAEDNNSWQGRDPWGNVVNVILPQSTNISNTLLPVRIIASKKHSLVAEPLII

SEQ ID NO: 11067 - protein, 227 aa, Lawsonia intracellularis
MIDFHIEVSCLGKGLLPSEALAFASFSGFNSVGLVIKSDAISYKYELPLLINTIQQSLLYTELNVFPGVVFAHVPPELLKDVVCSARELGAQLILAQGEGSFLGYSLSTAIGTNFAIINSGIDILTCPGLISSEDAAFATEKGISIELTGGYPCNLFNGHIVSMFSLFNFNLTISCGITKKSCFSSPEITRNFFQGIAFGAGLDKKSFDYIHCESRKTVQRLLLSTK

SEQ ID NO: 11068 - protein, 363 aa, Lawsonia intracellularis
LDILLPFEKRREQLHKVMSERKLDGLLVYHAANRYYLSGFELHNPQCNESAGCLIILANGKDWLCTDSRYTEAAKRLWDEDFIYSYGHNIPEQLGLLINKILPKGSCIGFESKVLSVNFFEAFVEQLQDITPVSADGIVEDLRVIKDEQEVRLMEQSCLLNHQLLTWVPSILRPGESEASVSWEIELFFRKHGANELAFPSIVASGGNAALPHAIPSSDTQIESEELVLVDVGARLYDYCSDQTRTFWVGDNPSKRFQQTLALVQEAQHRAIKAIQPGVLAKDVYNTVYTFFIEYGVEKAFKHNLGHGVGLEVHEAPSLGPRSETILKPGMVITVEPGLYYPEWGGVRWEHMVLVTEDGAKVF

SEQ ID NO: 11069 - protein, 352 aa, Lawsonia intracellularis
MRIAFINATKRWGGVKTWMLEFAKIFSKKGHHVYIYGRQEAFITSAQKEVGHGQLVSFGLDLNPKSILYFWREFRLHQIDIVIVNIEKDLSTAGIAAKLSGIPVIQRIGLPHDIPYRLKTRLIHTFINPSFLCPCEYIASGFKKSLSYIPPQQVKVIMNGRKATSEFLKVHSPLKFICTQQLEPNKCHSVLLEAFARVKGSFEFHIWGTGSEEKTLKQMASELGLTGQVFFHGFSDNIINKLEKGDIFLLASVSEGLPNTLIEAMSVGLLPIVRLVGGVDEVLTPELRDWVLPYEASSEDFQKVISMALSLSVDELTGLRESAREACRRFFDIDIQATKLEEWFYEVVNREV

SEQ ID NO: 11070 - protein, 428 aa, Lawsonia intracellularis
MKIFFCNWRGLESNSSRLRSVLFIFFSLSILLFPLGQALRVILPILCLPIIILLYIQDWNNSTLRILPFRWLFIIFIASFIIQLVTSEWLAASWASVKPNLLRGIVLAFVGMEVVRSEKDLRWLIIIFAVTFFYEGLDGVWQVLTGFDYIKHTAIMSGRLTGSLGTYRVGNYMAIIALPAFGIWTLLPMKNNRLRIVAVAVLLSPGLFLWLGSFTRIGYLALLGALYILWICIWTKFSLLKVIVPPMLLLVVLSMFGIARLSWETMLNDPRIELWIRAIEVGKEHLWLGTGSSTFILALQKQGIILQSVPSMDLGHPHNIYIQFFIDGGLIGFTSYILFFVIITLWTLFHIRRGVQKEIQGLFPGCYWQLLSFIWAGWVAYLITGFCGHDFYRTWWLSTAATLLGILIGGCQWGKKDSKKELDSVSLV

SEQ ID NO: 11071 - protein, 69 aa, Lawsonia intracellularis
MAKQCEICGKKPLVGNYVSHSNIKTKRVFNPNLQHMRNQFPDGRIKTITICTRCIRSGHVTKPSIHKGS

SEQ ID NO: 11072 - protein, 671 aa, Lawsonia intracellularis
MKIKLLQKICIILFLINYSLISGCSSTKIVVPEGNSSDLLEKTQDIKSIEDQDRNISAQAEEAWKNNNMLEAQRLYRIVVTQSNLTAFERNSAWERLIKSSIANNHFHIALEFLTQWKLSDPTANMQPVWQDSWGIAVLKSSRVQAISHAQQVWEDASLPIPLRGIAGGVLMILSPKENKTLIASKLSELYKHSDHANCMMLEQRLFTLLSNSSSEELLALEFLTGPERDFMYPWSIIILDVLRREWPSKTNRTAELLGKINYPGVFSDSSLLASAIHVAEPKSLLVDHTNILFSPGCYALVLPMSGPYSSIGWNIAKGANAAQEELISAGVDVEVVIINSEAVGWLEKLEQLPQKCIIVGGPLQAEIYAAIREKNILSNKIFFTFLPSIGEGDEGITAWRFFSSPEDQILALLRFSHELDITMCGVLYPEDGYGRKMTELFVKLAEQSGISVMTTGYNPHDTSSWSKLLANVTKTRMIGKVPVPSTPFQAVFLPDSWKNIEVLLPYLFFQGEDRLVLMGTNLWEQGLSHGEKNFIRNMDLAVFPGSWNKSTPNATAAMLIERFTMDNQEEPDFWVGLGYDFIRFSSALNIHEVNWQASQVNKSIEKAQQMDWSIAPIYWENGKAQQKLFLFYPTSSGGKLLNTNLFKKRLDAIKKRHLKRVSAAEREVSK

SEQ ID NO: 11073 - protein, 355 aa, Lawsonia intracellularis
MSNPQSIVVLGGGSWGTAVAHLLATGGHKVHLVLRSQKLADYINMHHENNIYLPGFSIHPAIHAVTGKISFLTKEPAHVLAKATIVILSVPCQSLRPVLQELEPLLTKNCILVNTAKGIEVETLKTVEQMILDEMAHRVSHYAVLSGPSFAEEVMCEKPTAVVLACRNEQLGEHLREIFSTPWFRTYSSTDVTGVELGGATKNVIAIAAGVSDGLGFGINTRVALMTRGLAETTRLGKALGASPLTFSGLSGLGDLFLTCSGELSRNRQVGLRLGKGELLKNITNSMNMIAEGIKTTYAVNTLASKLNVDMPITKAVYNVLEGVISPHEAVQKLLCRQLRNESLDETQPIWTDIP

SEQ ID NO: 11074 - protein, 368 aa, Lawsonia intracellularis
MTGKGCIIELKNVSKIFEDTCALDNINLQIANGEFLTLLGPSGCGKTTILRIISGFETPDVGEILIAGVNVSGFPPERRQVNTVFQHYALFPHMTVRDNVAFGLRMQKCPREKVNELVFEALRMVHLENFADRRPSQLSGGQQQRVAIARAVVNKPLLLLLDEPFSALDHKLRQIMQLEIKHLQRKLGITFVFVTHDQEEAFAMSDRVVVMNQGRIEQIGTPQCIYEEPVNLFVARFVGEINNLAGTILSCNDEGIYEAAIANEVFPLRTPHRFSPGEAVNVLLRPEDIRIYLLDEEVLKVPHLRGRIEETVYKGATVDIIIALDVGGTLRVAEFFNEDDAEISYNEGERVAVTWVDGWEVVLPHEMA

SEQ ID NO: 11075 - protein, 294 aa, Lawsonia intracellularis
MKWLKGFQLVVIAPTVIWLGLFALLPNVGLLVVTFLTRGDQEFVIPVLTFSNYARLFEPSFLKILWDSIWLALMSTLFCLLVGYPFAYRNARSKAKIKPWLLLLIIIPFWTNSLIRTYALVLILKANGLLSTVLIWLGIINEPISFMYSDFAVFIGITYTFLPFMVLPLYTTIEKLDPRLLDAAKDLGAGGFRAFWHITLPLTLPGIVAGSMFVFLPSLGAFYIPEILGGSKDILVGTFIKNQFFVNRDWPLGAASSTILTILLFILLILHHITTQSFSIKNRAENDPRFRRPV

SEQ ID NO: 11076 - protein, 258 aa, Lawsonia intracellularis
MKRLGLIWLWIVYIFLYLPIIVVIGYSFNIAKYTSDWKGFTLQWYSQLMNNTPLIDAGINSLSVAALSASFSTFLGVLTALAIRRYRFPGRKILYGSIYVLTVSPDIVMGISLLIFFIFFHIPLGFLSLFIAHTTLSLPFVVLTVLTRLMEFDEQLVEAARDLGANESQAFRYVILPLIMPAIVAGWLLAFTLSMDDVLISFFVTGPTFEILPLKIYSMVRLGVKPEINALSAIMFCITVVFVFIAWLLLPKTRHTGN

SEQ ID NO: 11077 - protein, 350 aa, Lawsonia intracellularis
MEKYTMKKYVSLALILVISCCPLFANDKDTLNVFTWSEYIPSDVLADFTKETGIKVVVSTFESNEAMYAKLKLLGGKGYDIVMPSSYFIERLYKDNLLARLDKSKIIGLNNLAPESLGHSFDPHNDYSIPYMWGALGLLFNKKVVDPTVITSFNDLNRPEFKGRVLLSDDMRDTFGVALKVRGYSVNTTNPDEIKAGYEWLQQLKPEIRVFDITATKQAFIGEEVLAGISWNGDAFIAMKENPNLQFIFPKEGFILWIDNFSILNQSENKENAYAFINFLLRPEIAKRCVEEFFYTTPNIAGRKLLDPIYQENPIIFPNDGVMSKGELISNIGNAINIYTSYWEKLKMSH

SEQ ID NO: 11078 - protein, 422 aa, Lawsonia intracellularis
MKLFQFIKNKKNKPETVSGMLQTTTSDTAQSLLTLEQWGNISFGLTPGRLRSILQAADEGNITEQHQLFSDMEDRCEHLAAEISKRKRAILTLDWEIVPARKDNPTAIKIADAIREQFNSIYSIEDLLLDMADAIGHGFSAIEIEWEYDGHIHIPKAFHHRPQSWFQMLPQNKNVLRLRNKDPEGDPLWPLGWVIRTHRSRSGWLPRAGLFRVVAWAYLVRSYALEASINYVQIHGLPFRIGKYHIGSSSSDKRALLRALQTLGKDAAGIIPSGMEIIFQSPTNTSHDLPGQLVTRCELGMSKAILGGTLTTQADGQTSTNALGKVHNEVRRDLMVTDALQISSTISKQLIMPMAALNCKVEDTTLLPSFRFDTRAAVEVGIYADALPKLSPIMDISAQWAHDKLKIPKALSKDDILGSHIR

SEQ ID NO: 11079 - protein, 147 aa, Lawsonia intracellularis
MKKLLSDTELDLKAFPEAVQFLINLIGEDGTFSLIQHYGGSTLRIPRGDTIVGRTKIDLLAQKIGKQEVHNIVQTFGGTCIYIPNCKKLLTAKQHAKIIQDRDKLAAKGISERQLVSDLARRYKLSDRHIWRILKKSYTIPAAFKNC

SEQ ID NO: 11080 - protein, 214 aa, Lawsonia intracellularis
MPQLLDKSTVKTMSLPKDRYMKNTQGHFILKEHIKPIDIERNNFVMQCVNKVKKIQKQLKELKKELTTDLNTFIQQTAKQYKVDMGGVKGNITLMSFDGNYQIKKQMVERISFDEGLQVAKAIIDECIRIWSQSSPGELRAVIEHAFKIDKEGKINTNAILALRRLNIKDPRWEQAMQAIVDSIHLVETKSYIRIYERMPDGKLKNISLEMSSL

SEQ ID NO: 11081 - protein, 246 aa, Lawsonia intracellularis
MDIQKIGEKLKALRGQESRDSFSAHFGIHRNTLAAWESGERLPSLEFLSLLAQQKKLSVAEILGEAGVVSTKGLSSPQKVQQEADTTVNSEYKLERERACSQFSWKGNDFTLIPLVKAVLSAGGGSFETTDKIEGHYAFRNDFLYYRGNPKTMKLFRVDGDSMEPRVSDGDIALIDQGQVAPRAGKIYAVRLEDVIYLKVLNTQPGKLILSSYNTDYTPIEFDTRGDMADCFSIIGRAVWIGRELD

SEQ ID NO: 11082 - protein, 902 aa, Lawsonia intracellularis
MALLSELIQRLPLVKNTHMSSQGFSLWICWDGELDNAVPQALQDYGGMSVVIDRSQALWFFFSSDVFLALAKLTVWSKFHPLPISVQVFPSKLLLSVRREISLSIDPSLATQEVLVPQSLEIWVHPKAKEIAGIIPGITYTLSKELQGMASVKWENLEADPRLPYMSSQGWYVLIHPVGNPLDKLFQSGWKTMYEAIEKIIQANKFKYNLHNNYLMLSIDNLRQLRIWVRDILKCISDAKVQGTYWPCVCISIDKKGLNFTNDLPTKVGIKWDNLIPDVPYITYRNAFLLGEGFKITDLNFSSSHVSMDSWCAVELTEDSSFVSEVIPILMPEKLVSGENTGCFYCGSKNHDNSQCVTRGMSLSTQNIWNDLAEMSVEVMSEGFQLIEQELNGDDVIVGYENILFKDNTLEQRLLKAIFETNLPLQVRSIRNIWLATGREFPKSGDVFSSKNNVKDDSLAWGLLERFKKIQASELLSFEKDVLSASRNAPRDFRLRTLLGFIAVEKGDLSRAQLLWKEAESLASTGLHQVWHMFLQARLLEIQGRFSEAIEIYQNVLRLYPSWLDAEYRQIVCHVKMGFAEQVQTKIFQLIEQDSSFFNRFFIDPELDRGYLSILSELLVALEEKRRLASDEKIKAEKLLIELDEWFPKDHAIANTFRQKLKLVINNLSLNTYVAFLSIIQMRPIIENDITKQIKYEIKNLKQIFKIYLKQLEKIRDEAAWFPFPNILIEFNKNFNECANIFNWAFTSNFNDAEVFKKARGYAPLLQEYLEGLTQRLKFLRIVRDVTLFILILGKTFFWIEVIGLLLCATSVPLIAVFGSKVGLGWLSTLIKEEQWGLQRVLLLIISSVAIGISAIHTTLVFERKRDQLIAEARGQREKIQHIRLKHINEAKKEKQKSIEKI

SEQ ID NO: 11083 - protein, 416 aa, Lawsonia intracellularis
MDKLIIEGGYPLKGTVTVSGSKNAALPILIASILANKKVTLHNVPQLRDIRTTIKLLEILGCTIQQTEQCIELTPGTLQHEAPYELVCTMRASILVLGPLLAKLGKAKVAMPGGCAIGARPIDLHIKALEKMGAKFTLKDGYLIGDCTKLKGTHIYLDFPTVGGTENLLIAASIAEGETILENAAQEPEIEDLARFLIACGAIIKGHGTNVIHIQGVPSLNGCTYSIMPDRIEAGTFLTAAAITKGELLISGCPYKELEAIINKFMQMGIHIEKRECGIYVAPIKTLKATDVTTRPFPGFPTDMQAQIMALMSIAYGTSTVNETIFENRFMHVQELARMGANIRLNGHTAIVTGVKELKGAPVMASDLRASASLVLAGLAAKGITTIQRTYHLDRGYEFIEKKLNAVGASIQRTNE

SEQ ID NO: 11084 - protein, 259 aa, Lawsonia intracellularis
MPSLLRLTSWNINGFRAIIKKPHWNWFHENQSDIIALQETKVDPSQLQDNLQKPEGWLSYWSASIKKKGYSGVAVFSKPKPLAVTAELPNPTFQGEGRLLHLEYPSFHFMNIYFPNGTQGDHRLSYKLGYYDSFLNYAEEARKTKPIVVCGDFNTAHRPIDLARPKANEETSGFLPIERTWMDRFIAAGYIDTFRYVHGDIPNNYSWWSYQQRARERNVGWRIDYFFVSIELMPTIRDAWIEMDIQGSDHCPVGLTLEI

SEQ ID NO: 11085 - protein, 163 aa, Lawsonia intracellularis
MTRLFLSILSLSLLIYTPYAFGEMSLSFLGSTSTYTGLEQHEESRTLLSDKLWKSYVSHKQTFSSYSPKNSNPFISKDKKISNKKEAAIKEARIKPSNSIKKQELSKDISIQKEAQLKLNGQPETPKEYSNQASINSTKKEPTTLTRKPSILEPITSIKPSLI

SEQ ID NO: 11086 - protein, 244 aa, Lawsonia intracellularis
MRKLWILLSACLLSISPTIASAEQTGLYIAPKFIWGFAPVDIKTTGTIGIVNVQTISDSVSHKKTESLPGGALAVGYDFNHMFQTPIRTELEFSFFKKMDIKHNGQKTDITLGALLVNGYFDIKTDSPFTPYIGVGLGIAGVKTKSNAIIDSLGYDIKVKLDDKTKKNFAWMATVGTSYEISETFALDLGYRFAGFGKGETKSWNKSQIVDLLPLGPVTATANASLKTKEIFMHQIILSARLTF

SEQ ID NO: 11087 - protein, 755 aa, Lawsonia intracellularis
MGNNNNDNGISVNSLPFRDGKSAEPHYSNTIPQSKYKISQRPTPPGVEPMTSGSFKTPDNTTEKIKAMDSVRVNGHDMAITTNLGVKIANNQNTLRAGVRGPSLLEDFHLHEKLAHFHRERIPERVVHARGSGAYGYFQVYKSMRQYTKAAFLQDPGVKTPVFVRFSTVQGFRGSPDTARDLRGWATKFYTQEGNFDLVGNNTAVFFIQDAIKFPDFVHAVKPEPHNEVPQGQSAHDNFWDYVSLQPETLHNVMWAMSDRGIPRSYRMMEGFGIHTFRLINEQDKSCFVRFHWKPVYGTSSLLWDEAQILTGRDPDFHRKDLWQAIEAGDYPEYELGLQIIPEEDEHKFDFDILDATKLIPEALVPIELVGKMVLNRNPDNFFAETEQAAFCPANIVPGIDFSDDPLLQGRIFSYFDTQLHRLGGPNFNEIPINRPICPVTNQQRDGNHRMQIDSTVANYEPNTVSGNWPREVQPSEHGGGFTTYKSKVEGTKVRERSPSFFDYYSQPRLFWLSQTAPEQKHIIDAFSFELSKVMRPYIRERIVDLLSYIDRDLAKGVATNLGLTLSQEQLSYDLPKPVNGLTSDPSLSLYAKNKQNIKSRRVALLVADGVSKESIETISNMLHKEGVYPQFFAPHMGSIKTEEGNEITVDGTIEGNPSVVVDAVIVPQGKQSLNTLLNDGNAKYYLCQAYKHLKPIGLPGNTKEMLSYIGLSENDIDEGLVLAPDSPKMIGKFIDAMKQHRIWSRESKITSFSA

SEQ ID NO: 11088 - protein, 585 aa, Lawsonia intracellularis
MRWKDISIFKKLLIGFSIVILAGVIGLANDYFEVTRIRNITDQVLLAVNYRKAILNAEVAHLTWVNKVANYLIERGKNELHVELNDHLCTFGKLLYGEQRKEIEERIPETKSLFLFIEGPHNRLHQSVIGITAAMGEGKINEASQIFQNVTLKELDLIRTTLNKLVVVFDARSTVLEDSLINTIHFALVVILLCVAVMLIGGLLLSLFLGRSIVRPIWKLVAYAHEVSEGNLKDPTLNQKDEVGQLAGTLGIMVNKLKKTIEEANMKADEAYRKEEEANAARVNTESAIQEVKKKQQELQDVTVQLKGVVDVLSSASKEMSTQIETSERGAILQAKRINETATAMSEMSSSVLEVARNANVAAELSAEARTRAEEGSGIMNNAVESIYEVQKHSLMLKEDMQILTQHAQNIDQIMSVISDIADQTNLLALNAAIEAARAGEAGRGFAVVADEVRKLAEKTITSTADVGKAIGAIQHSVEKNMGQVDKTVQSIESTTDLSTKAGELLRNIQEMVESTASQVRSIATASEKQSATSEEISSSIEEVNQVAKETASAMVSLNKAMVDLAAQSRGLQELIRKLEQETIG

SEQ ID NO: 11089 - protein, 423 aa, Lawsonia intracellularis
MSINKSSHRSFRIICYPNEISLVENLLSEQGFIFEPDPFLYLARKIIYEPFPLGKSLAAFFGLIYIQDRSSMLPVLALQANVGDIILDMCASPGSKTTLLSQLVGNTGLIVGNDPTKSRLLTLRNNLGRLNCFNTVTCSWPAEKLPMPDATWGKILLDPPCSGWGTIKKNPQVTKIWQGERINPLIILQKKLLTEATRLLIPGGKIVYSTCTTNIDENEAQIQFAITNLGLKLIPLELPLGFSVIKPISPSYEGVIRLPNTHDSQGFFIACLQKPGKNTTKIDTTNEKIDISSYPHYSLDTLGPFGIDITKLPQGNLVDFNSNLHFIPHAALTYLPYTLYWQGPIIGKTSKTNILPSPRLRLLQSTTDLAYCLHIDNVQQLEKITQGQSIMTDFKGKEVPLFWKELPLGRLKVKNGRVFWSEK

SEQ ID NO: 11090 - protein, 547 aa, Lawsonia intracellularis
MHQKSCLVALCIMFIIMVQVLQANAASYVVLPFKVNAPPSYTYLEKAIPSMLTSRLYWEERFQPIPDANAIKAGKVEDIKEMDKARIATGADYLIWGQVNIVGDEATLDVQVCDIEGSIWRKSKNTKVDNLITALQDTADAINSELFGRATTKPSSKATIVAQMNSGLIKGKGNENQSYLNPEFRYQGSNLSRGRSQALPFASVGIVVGDFIGDNKNEVAILSEYKVHIYRWEEERLALLGEYKFPRSLQSLHIRAFDVDHDGVQEIIVSCFDPSYAKPYSFILSFKNRVFKELATNLPFYLNVVKLPPDFSPMLIGQKSDNSRIFSPSGVYEIEKHGRNYIMGNRLSLPKEANIFNFSWLPSDSLKDEEAKLVLVTNNERLVVYNTKGTRLFMTEEVYYGSSVGIDEPSNMPGLGKSKELIPSKYFIPGRMIPINLDSMGKWELLVSKPISVAAKFFENYRSFAEGEIQALTWDGLGLGLVWNTRRIKGTITDFALADMNNDGKLDLVVSVNSHTGILGLEKRKTIIVFYPLEVDKQGIPKAVEDN

SEQ ID NO: 11091 - protein, 373 aa, Lawsonia intracellularis
MASIALMLPRFGLYGGVEQFAYRLAEALAEEHSVDFICARAEASPPLGVRVIIVGRLGWFKWLKIAWFAICAEQVRKKGSYDLVIGLGKTWNQDIVRIGGGPQSKFWSLSEQAWSPGFHRYSKKFRRYVNPASWLNFIIEKHQIYSQSTLICVSETVRQWVLEAYPSIQSPEVIYNLPDFSRFTPTTYEQRVVARAKFDLDMGHIAIATATSNFMLKGTRSLIKAMKLLPLNFKLFIAGGRDISSYKKLVHLLKVQDRVVFMGKVEDMLSLYRAIDLFALPTYYDACSNAVLEARACGLKVLSSKYDGSSSFLPQHWLINNPSNSQEIANKLLSMSQEPPPSPMYIPSTIKAGLSSWVNFIEFMLQKKSLMKM

SEQ ID NO: 11092 - protein, 264 aa, Lawsonia intracellularis
MKLKIFFVVTILLTSFYTATAHEFLIKSDKDNVVKEEKITIDVVETHVFIKPEELPVLKDVLLSFIQGKKSSETIKLESISKENLLRGIIDPTTSEDIVVFAKRLPQYWSETTEGILEGDREILEAQGKKVLSVGSYEKYALLFIPGEDSKTISNYVVPGEHPPLFLAPMFNPYAVKVGQKIKFMVTSEGKPVANASISATYDGFSDKENVYAITTKTCKKGLVQISPDSPGLWLITTEVKDKLVDSIADEKSIRSTTLFWVTP

SEQ ID NO: 11093 - protein, 445 aa, Lawsonia intracellularis
MNIHNIAIIGGGLSGCECALTLAKFGFSVTLFEQKPQLFSPAHNTPLLAELVCSNSLRSNELTTGIGLLKQELRELNSPLMAIADTCRVPAGKALAVDRELFSKQVTQLIESHPKIHLIREEVSSLSTSFLEKYDRIIVATGPLASPNISNSLSTLIGDKYLYFYDAIAPIVTADSIDMSIAFWGSRYEEQGEGDYLNCPMSYEEYQIFYSSLLKGEKVTNSKVEKEIHFEGCMPIEALAERGEKTLLFGPFKPVGLINPHTGLRPYAVLQLRPENLNKSMLNLVGCQTKLTYPAQDTIFRLVPGLSNVEFVRFGSMHRNTYINSPKILTDQLALRNFPCIHLAGQITGVEGYVESIACGLWVSILLLALSKDKKILRPPKTCALGGLLEHISCPSKQFQPSNIHFGLVPEPTEKIKKKERKEWYAQRARIDFYHWLNNELIHIM

SEQ ID NO: 11094 - protein, 211 aa, Lawsonia intracellularis
MNNYNYTSLNSDTIKNIVQFFFEAGMLRYIPRSGYPFLGTGKENVAEHSYRTAIIGYILAKECGANPEHTSLLCLFHDFPEVRIGDLNYINHIYVKANTRKALKDSISGINIGESILSLWDEYSNCQTLEAIFAHDADQLDLALNLKVEQNLGNPYAKNWLENLFSRLKSSLAKELYHVILISDHTDWWYKQKNKRWWETRELKKDDSHKK

SEQ ID NO: 11095 - protein, 405 aa, Lawsonia intracellularis
MTNNLSPKYDYEHDYDVVILGAGASGLMCGLTVAQKGLSCIIIDHSPTIARKLCLAGGGKGNITNLNLSPKWYVGENPIFCKDVLLQYSPHDIIDLLKKYNIPWEIRSHDQVFCKVKVAHFVKCLIDECKKNNVQFLLKNSIQKVSANPKSFVIKTSTQLLKTSNLVLALGSQAWPATGATDLGIHIAKQCCHTIIPTRPILVPFILQKNSPLQDLAGISLNVSITIGADNKKRTFHYPLLFTHKGISGPAALQASCFWEKGQTITINFLPHISLIDYMHSFSNTKQTVKSLLKNFFPTRFIDNFIPINLQSQKVAEISKKNRIWLSNKLHAYVESPLETEGIKKAEAMAGGVNTYEVNPHTLESNIIPGLYFSGEILDITGLLGGYNLHWAWASGYVVGKTIQR

SEQ ID NO: 11096 - protein, 108 aa, Lawsonia intracellularis
MNPTSEALMAAWEFRYACKEFDPVKKISEEDFHIILEGGRLSPSSFGFEPWEFLVVQNVELRSVIRAFSWGGQTQIPTASHLVIILARKPETMGPNSSYVRKTIMEDT

SEQ ID NO: 11097 - protein, 99 aa, Lawsonia intracellularis
LKHDFNLLGNERACFEWVARQCYIPLANMMTAAAFLGIDSCAIEGFIKADLEKLLSDKGYIDPNEFGAACIVTFGYRKESSPPFLKTRRPEKEVVHWIN

SEQ ID NO: 11098 - protein, 135 aa, Lawsonia intracellularis
VSVILAKYIGNFQVECLHVSSGTKIITDPPLNNYGQSSSFSSMDLFVTSITTCIITAMHIHALLHNIKLIKLEAETKTIVTHEPKRIKTIEIILNISTINITEKDKIALETIAKDCPLCHSLHPALELLILFHWS

SEQ ID NO: 11099 - protein, 439 aa, Lawsonia intracellularis
MGLTPKECQKLLKESNPLRVYGKVNKVVGLVAEGTGLKSPLGAVCHMLSGNDEHGEAIAAEVVGFREGNLLFMPYGEMRGIQPGSLIRNTSLPPVFPVGKEILGHAFNAFGEPLSGGNPIIPEKLIPLYSNPPSPLERPRIKDPLDVGVRAINSMITLGKGQRVGIMAGSGVGKSTLMGMMARYTSADVNVIGLIGERGREVVEFMEKELGPEGMTRSVLIIATSDQSPLVRMRAAYAATAVAEYFRDQGKDVLLMMDSVTRFAMAAREIGLAVGEPPTTKGYTPTVFAQLPKLLERTGRSNTGTITGIYTVLVDGDDFNEPIADAVRSILDGHIVLTRDLADQDHFPAIDVLRSISRLRSDICTPEQVQDGRIVGRYMATFRKAEDMINIGAYIQGSNEEIDKAITMHGPIESFLKQNISDRSTLEDSFRLLHDLAHR

SEQ ID NO: 11100 - protein, 481 aa, Lawsonia intracellularis
MNNKKFSTDEKNHPKNKLNTGTVFMGPSPDKESSLKQVIGTHEQEVWNRRTVSEYMTRVRERATIHVQAMLDKARANAETIRKTAKQWAEKTKKESDKLHKQAQQALKEAERIREEADHIRELAHEEGYRLGIEQAQEEIKEQIKSIHMTAASILKTIERQYTVIFDNWRSDLVKLLHTATEVATDWILSKEHTAILDSVLNKAVQQLEERQRVTIRVNPNNKNTIIDLITNIKNQFPELKNWEIKIDVTMGENDVIVESRSGMVDSNSQLRKEEVRAILQQLIIPESEIDIVAAQSIADIADITGITALSKEAAILQHTPVQNDSSEKTPSSKETLSPNDKKPISPAEIDLINPPSEEVEFTFPELEGIELPPDIPQYEINKELSSGLSSTDESTITNPSLSTSLTDSFTSDISTDNNSILTSHHTDINDNIERDIFSELPKNLQMEEFSSAMVEQGSNHELNMDNTPSQVTLTNFTPSE

SEQ ID NO: 11101 - protein, 331 aa, Lawsonia intracellularis
MELTGTQKAAVLLLVLGDKFTAEVFKRMERREIAAISKAVIDLDTVSKDTVEDVLRTFHQDLVTGKDLIIGGQDSLKRMLMKNLDGETAKYIMDSLNVESGPAPFKELEKVSPKLLSQMLRNEHPQTLALILGHLSPEQAASLLIMLPAGVRAEVLIRLAKLESVPEDMLVEVDRVLQSQLIAMGSKEGKKVGGVQSVAEILNAVDRATEEEVLAEIEEDSAQMAEDIRNLMFVFEDIKGLDDRSIREVLKETSNEELTLALRGASDELKEYIFRNMSERGANMVREELEFMGPTKLSDVEQAQQNIVKIVRRLEGEGKVTINHGSGDVFL

SEQ ID NO: 11102 - protein, 554 aa, Lawsonia intracellularis
MQNFISQIIARITEFWNNSNLTQKLFIGGSAVFVTLIFIGLMFWINRTDYKVLYSNLGPEDANHIIKTLQADKVSYQLADNGKTILVPASSVYDLRIKIAGEGGMVGSGIGFEIFDAVNVGQTDFVQRINYQRALQGELSRTISEFPNVESARVHLVIPQRSLFIEEQQKPSASVVLKLKNPSRKMDQKEVQGMVNMLVMAVEGLDKEHVSITDSLGKPLYFPNEDNLAGLSVTQREYKLKVEQGLERRIDELLIPLMGQGKVIAKVNVDLDFNQKTIRREIYDPNSSVIRSEQRSEETNRGQSNLESGSPDVNFRGDGPNGAMSTQEGTRETRTTNYEINREEQNIVGEVGQINRMTVAVVVDGTYVKEPNGEYKFVPRSQEELNRIRLLVSHAIGFDRARGDTIEVSSIPFDEADLPIEPPAAEVIAKYAERLGKPLLNALLAFLFLMLVVRPVILALIRPKVESEAIVEGLEGLPSAEEQLALYETQEEAAKAAAMEAVRIASEEEEEFESLKHLEDIKNYTLQLAENNIEQSILVLRGWMKDDTKTAISS

SEQ ID NO: 11103 - protein, 115 aa, Lawsonia intracellularis
MGKTMSIQSTGLKAYTNVMSDFKKVQDTFKEKSAAIPQSKPVEKSFADTFKDSLSNVNEMQTTKSQMIQSFASGETQNVHELMITLQKAGLAINMTSAVRNKVLEAYKELSRLQF

SEQ ID NO: 11104 - protein, 146 aa, Lawsonia intracellularis
MDFMTAFDIGASALSADRTTINVTAMNLANAKTTRTPEGGPYRRKTVIRAATDVDEPFSKQMQSALDRELKGVRILNVLPDNRPPKQIYEPGHPDADENGMVSYPDINVVEEMANLMTASRNYEANSTTIDTVKNMYMRALDIGRG

SEQ ID NO: 11105 - protein, 137 aa, Lawsonia intracellularis
MKSLYEPHVNLVAKVMDMQLQRQNVIMSNIANVNTPRYRPRTIEFEDQLQKALGLDMRGRMSRTEENHLPAVFNPEGFNAEWDKAIKPTVVHGEDRVNLDKEMANMAKNSLQYNALTQVIKGNLDGVKNIIMEGSKV

SEQ ID NO: 11106 - protein, 252 aa, Lawsonia intracellularis
MLLKVENILFKYNLHNSFILPTSYNTLNYISFSLDNNEKVALIGANGSGKSTLLLTIAGCLKPLAGTVQIMNNDITGSPKKAGKYTSLLFQHPDVQLLFPSVREEFLFALTQSSIYQKNKEMLIEAIAKQYDCFHLLDFPPQRLSLGEKQRVALAVLLISHPQLLLLDEPTAALDPKSRKNFIHLLQQIDTAILIATHDLDMALHFANRVLILSKGEIKADGPSAELLSNEQLLKKYDLELPLSLQSCMSLT

SEQ ID NO: 11107 - protein, 248 aa, Lawsonia intracellularis
MKFDLYGKPNHPLLDILTPRAGLFCAIILIIGTILNHSLISIGILFSMAVIIALWSKSIKKVLSILLPINIFIIIVWITFPLTIYDPTPITIFPHFSISLVGIKLAFILTLKTNATALFLISFVTNNPHEFGKTLQSLKISNKLIVLFILFYQHICLLHKDIISALQSLSLRAPKLKGIPKLKAYAYLVGTLLVHNIDRANNIRMVLLQKNSPIMYNSNSYPKTTYKDISVCILILLMTVTVTYYFNT

SEQ ID NO: 11108 - protein, 211 aa, Lawsonia intracellularis
MHISEGVLSVPVLAGGWTCTIILLVISLRRITYSCLPTMAVFSSIFFLTSLIRVPIGPTSAHFALLGLLGLILGWGTFPAICISLMLQAILFQFGGIVALGVNCIVMGLPALLIALIFRQKLHCQSPNKIKLFSFIAGFGAIFLATCLLYLALILSNQQFKYVALTLLTANVPLAILEGIITILAIVFLQKVAPELLSSTNCTTNNYCNEV

SEQ ID NO: 11109 - protein, 165 aa, Lawsonia intracellularis
MKYFFLIIFLLLCSFVHEALAHGVSGQIITTQQPIGVEFLYSTGEPVPYAKIEVYSPENKNIEYQNARTDKFGRFAFIPNTQGTWTIIMSDNVGHRAELPITLTEDDILTQTSTTVSSLNSTTQVCPIMAMPLWLRALLGVSLLFNIFIGLFIIFKYRKSCHAHK

SEQ ID NO: 11110 - protein, 520 aa, Lawsonia intracellularis
MWLTTSYKMGMAALIMAGSVILSRVMGLIRDKVISWEFGATSEADIYFAAFVIPDFINYLLAGGYISITLIPLLSKSFQEDEQNGWKFFSTVFYWATIAISVTTFIAWFFAYDLAKITAPGFTASNQERLGFFLRIILPGQIFFISGACISALLYIRKQFLVPALMPIIYNSCIILGGLISSSNGMEGFCWGVLIGAALGAFLLPFGVGLINGIHFYFSLRHPLMKHFLWLALPLMLGQSIIILDEQLIRIFGSLAGEGAVSLLNYARRIMLVPVGVVAQSISVASFPFLATLAAKNNNTKFNETLNKALKGSLIIALPITGWMIGIALPTLGIIFEGGRFSHIQTVLTAPLLQIMLFSVPFWVVQQVIGRAFYARQNTLTPALIGTFSTVIFIPFFSIAVKSWGSIGIASLTAISIITYTFLISYKWYKTFGITAFTGLKTILMRSCFIVIPSGLSAWIITTLTSSFLTSFSPFILYLLTIAINTITFSIFYFILAFYFFPPISNIIQNYFKKLVTQLT

SEQ ID NO: 11111 - protein, 693 aa, Lawsonia intracellularis
MILPGQKVTIGVIVRPIKGFRNKGGYNIANYWYRQNVYFQAWSKDAAVHPIISGTPYFSSWLRGKLYHQFIQCIQQTSNINQQSITTQKSTTLHIPPEKSFIPALLFGDRFFLSHTLNAVTCYTGLAHSLALSGQHLAVISIASITIIIILIKILPCFFLSLPRYKAIPLFSLPFALLYLWIGGAPPSLLRATIMLFIWSIYLIQNKPICFLDIAIIALICLILFDPQGIYHIGIQLSFLAVLSISFFNPLLQKCWKAIHKRISTTITSEILYSTITTSIKIIIFTIGTTLIVQICTLPLCLYVFGYIPIWFPLNIIWLPILGIFVLPLAFVSLLFCSLQCTSIGILCINLAQIPCEILIRLLLSLKNTEIISPIWLPRPSWTMLLGCYLILLSIGIKLGRTGFTTPAKRILIAGMILVVTPLFFILSKDNSNKIRLRIMDVGQGQAILIEWGKNKRALIDAGGFYSNRLDTGRDILAPILSTTHSLHLDFFAISHPHRDHIKGFLFLANVFNVDQVYSAILPAIDSPKGNASPLLLQLDTILKNKRIPRKALIRGEQIPLSNDIYLEVLSPPKGVIPKGNTGLILRLVAKNHGLAFLPGDAEHNDLKELLKTNLEVQSEVLVLPHHGSKSSFLPELYKKIHPTVAVASTGTLNTNDFPSTKVHNALLQYDIPLRTTAEEGELTFEWDLDKLH

SEQ ID NO: 11112 - protein, 286 aa, Lawsonia intracellularis
MNKSSPIGLFDSGVGGLTVLQALQNLMPNENYLYLGDTARLPYGTKSPKTVLHYAIQSASTLIERQIKLLIIACNTATAAALPLLQETFPFIPIIGVIEPSAQIACKTSLKGHVAVIATESTIQGKCYEETILRYRPEILVESKACPLFVPIVEEGWFSGPIVESIIIHYLSSLFFNRSIKDQPDCLVLGCTHYPLLSETIQKIIGNDITIVDSTVATAKLVQACIIQHNMVNPNTNLIGSTIFLTTDDKVRFARIGSLFLNTSIQEDKIEVVDLHMTNVQPNYLS

SEQ ID NO: 11113 - protein, 270 aa, Lawsonia intracellularis
MQTKQKQIPQLLRNHTQSSTTTSIRINKALANAGVCSRRNVDKYILNGEVTINGKSVTQPGIYIHPDKDIIALHGRRVDIQLKNKKYYYLSMYKPIKVISSVKDPQNRLTVLDFIPFPWKNYRLYPVGRLDFFSEGLLLITNDGELTQRLTHPRYHISKVYHVLIRERILNTTLKNISKGITLSDGTKLPPAKVRVLSSITETNTTWLEITLQQGINRQIRRMCKELGLTILKLIRVKQGNINLSNLQPGEVRPLKNDEIKLLKKNVQLI

SEQ ID NO: 11114 - protein, 605 aa, Lawsonia intracellularis
MIKKLFPFFFLKNQNQEKQTIIRVLQYFYPYKWAVITAFIASGIVSLSTAGIAWLIKPALDDIFIRKDVEAIVYIPIIFIILTLLKGIGRYVQNWCMSYSSFGVLEKLRQELFHKIIRLPLSFYETSQTGSLMSYVINDVGMIRQSLPAIIQAVRQFLTIGGLLYVVFTQNFSLACWALIVLPIAAFPFVMFSVALRRYGRRSAEIIAKTSSLLQELLSGIRTIKAFATEKEEIERFDIENSYISKLSLRQSTISELSSPVMELIGSIGVAIAIWYGGTEVLEDKMTPGTFFSFVAALIMLYEPVKALSNANMSLQNALAGAERIFSILDDSKLHIETGGSVLCGKEFYELTFDHVTLRYDSVSEPALNDVSLTVRTGEKIALVGPSGAGKSTFVSLIPRFYNPQAGSIFFNGRLLTEYDLVSLRQAMAIVSQEPFLFNMSIRDNIAYGQPLEVRDNIIKIQAAAVAAFADEFIDLLPDGYNTKVGERGVKLSGGQKQRITIARALLKDPSLLILDEATSSLDSESERMVQGALENLMRNRTSLIIAHRLSTILESDRIIVFEDGKIVSSGKHKELLGSCELYTRLYMMQFRTGEFQDAPIEKGC

SEQ ID NO: 11115 - protein, 214 aa, Lawsonia intracellularis
MRLSKKVVKPLCKILEWPLYGLYCLWCGTLQYNAINRQSVDSRTDAGLPVILCLWHDELFPLIYFRGKLKIITVVSKSKDGDILANVIQRIGLETARGSSSRGGSEALRNVIKRMKDGFCACITVDGPKGPRHKVKKGVIFLAQQTNAPIVPIRIFMEKSKKISSWDRFQLPIPFSKIHVICGDAYYVSPSLTTQEELTDQCRLLEERLNNLRL

SEQ ID NO: 11116 - protein, 294 aa, Lawsonia intracellularis
MGDISTLTSLTYKYFPLLFHKLGLSKLRLIASILSTLSWWCLPFRRGLALRAIEKHLDVSLPTAKRLAKESFTENFLSFLESMLIPSFGFECSSLIMAQGDLLKKIQMLQRPIVATTAHLGAWELLAGLLGDFSTVTPSAVVVRNYKNTFIHEITTKLRSSRGAIVLGHRQATRSILRILHKNGTVAFLVDHNTSQKEAIFLPFLGELAAINIGPALLAIRSKALVLPLFLVRENNKYIFWVDDPLDTCLLKGNNTEKVETVASFYTEAVEKAILRTPNQWFWMHNRWKTRPSI

SEQ ID NO: 11117 - protein, 456 aa, Lawsonia intracellularis
MITGHEIISTLNMIQNENLDIRTITIGINLFDCASHDFDIFAYRVSSKIIRYATELVPICKQVEEHFGIPIINKRISVSPIGVLGASFSTEQFIKTCQLIDETAESVGVDFIGGYSALIEKGMTPGEKNLIESLPEALAVTNRVCSSINVASSLAGINMDAVALMGQKILDVASATSTANGIGCAKLVVFSNIPQDIPFMAGAYLGIGEPDVVINVGVSGPGVIKKAIDRALSTCDTCTFTELYDIIKQTAYKITRVGEIVGKEVASRLKIPFGIVDLSLAPTPSIGDSVGEIFQSMGLSSIGAPGSTAALAMLNDAIKKGGAFASSQLGGLSSAFIPVSEDASIAAAVQSNILSLEKLEAMTSVCSVGLDMIAIPGDTPASTISGIIADEMAIGVINKKTTAVRIIPVPGKKVGEKAFFGGLLGEATITPVPKGNATTFIKHGGCIPAPLSSLRN

SEQ ID NO: 11118 - protein, 187 aa, Lawsonia intracellularis
MNKSVISIIGMDSPGVIYTVSDTLLKLNCMFDTVSQTVIKNQFAAIFIIIKPDRLDNHIIHQQLSNTFLQKNMDLHITIHPFHDPIPLHLSTNNSKFIVTVKGKDSINLITILSKVITQYKINIEKLVVDTDDRSQTSFVSCEITLSSLINKDALYNDLKLQLQPHSSNITIQHSQIFEAMHRIPIL

SEQ ID NO: 11119 - protein, 591 aa, Lawsonia intracellularis
MSLSPLNYADWEIAQAAEKHMKTVYDLGKDLGLDHKEIFPYGHYMGKVDYKSVLSRLEQSSDGKYIDVTAITPTPLGEGKSTTTIGLVQGLAKRGKRSSAAIRQPSGGPTMGVKGSAAGGGLSQCIPLTQYSLGFTGDINAVMNAHNLSMVALTSRMQHERNYSDEKLYALSNMKRLDIDPTNIPMGWVMDFCCQSLRNIIIGIDGVSGKSDGYMMRSHFDIAVSSEVMAILAIAKDLKDFRQRISKIIVAYDKQGKAITTADLEVDGAMTAWMVEAINPNLIQSIEGQPIFVHAGPFANIAIGQSSVIADRLGLKLSEYHVTESGFGVDIGYEKFWNLKCHYSGLTPDAAVIVTTVRALKSHGGAPIPIPGRPLPKEYTEENVGYVEVGSANLIHHINTVKKSGVPPVVCINAFTTDTPSEIAKIRQLCELVGARVAVSKHWEYGGDGALELADAVIDACNEEKNFLPLYDWSLPLKERIEKIAFEVYGAEGVEFSEEAIYKLNKLQADNNSSDLGVCMVKTHLSLSDDPKQKGVPDHWKLHVRDIMFFGGAGFVVPIAGSITLMPGTGSNPSFRRIDVDTDTGKVKGIF

SEQ ID NO: 11120 - protein, 297 aa, Lawsonia intracellularis
MAADIINGMEIRESILEELRGEVANLKRDYNVVPGLVTILVGNHPASLSYVTLKIKTAIELGFHEIQDNQSETITEEELIGIIKKYNEDPLIHGILVQLPLPSHINEGKVLHAIDPNKDVDGFHPMNLGRLVIGGNAITFLPCTPAGIQELLIRSSVETLGAEVVVIGRSNIVGRPISIMLTQKGVGGDATVTLVHTKSKNIVRHCQQADIVIAAVGVPNFVKAEWIKPGATVIDVGVNRIGFNEDTGKPILSGDVDFVNVSQVAGKITPVPGGVGPMTIAMLMRNTVRSAFFHLSL

SEQ ID NO: 11121 - protein, 447 aa, Lawsonia intracellularis
MIKSPEKKYTNRKKTKTAREIATIALQKIKEGQPIQVLLNNILLTYPLSKQDIALVTELVYGYLRLEIRIVWILEQFLKKSEHLPYEVKLIIGLATYELLFLDKIPPYATIHTAVSTIKSKFGKILAGVANASLQTIFRKSKHNDGPKYNTFYKQRLPEDIHYLSIWYSIPLWIIKLWISNYGTQKTLKLAASSLQRPYFCIRVNPIYDNWRELYENLCQNGGIPIGRSGIYFKPNRKPKELQYYLEQGYISIQGAGSQIVMDALDIQTWKIPIWDACAGRGGKTSLLLEWGIPIFAASDISLSKLQGLIAETKRLKLLTPSIFCSSSTQPALKNVLCSQLKTILLDVPCSGLGTLSRHPDIKKFRTPKDVDKLIQLQKKILNTAWEFLPPQGELIYITCTVNPSENEQQVIQFLKDYPQASLKKQWEGIPDRFGTDIMFGAIIQKK

SEQ ID NO: 11122 - protein, 457 aa, Lawsonia intracellularis
MPEHILLIDDEKNYLLVLETLLKDEGYQVTALNDPETALAFLEESEVDIIVTDMKMPKISGQEVLEYVKQRWPHIPILIMTAFGSIENAVATMRYGAFNYITKPFANDELLLSIKNAAELAKIHRQYRILHESLEERFGKHQIIGRSNAIKDMMKLVTRAAPSRATVLITGESGTGKELVARAIHFSSPRSQQPFISVNCMALSPTLLESELFGHEKGSFTGAVAMRRGRFEQANKGTLFLDEVGELTPELQVKLLRVLQERKFERVGGTEELDIDIRIVTATNQNLQSMVQNGTFREDLYYRLNVVHIPLPPLRERREDIPLLVAHFIEKIASENDIKSKNFTDEALNYLTGYEWPGNIRQLQNVIERCLVLVPNDIISIDDLPSEIKDEEAQFKSAVDLLPVEIDLAATLEKIEATLIRRALARTNFTQVKAAELLGLSKSLLQYKLKKYNITGH

SEQ ID NO: 11123 - protein, 480 aa, Lawsonia intracellularis
VSQKPAIKTKLPFGLTRFLSWISLVLILISSIVLALFIGNSARHTLLLRQQQYALLIVGNLNHQIYRRFTLPTFLTFGRIALRQPIQYKQLDEVILSTIHGLHINSLRIYGMDKIVTYSINKDELGQDGHIPPTAEPAIETISPSFEILSTLSLLSAMFTLKLPPNSFILRTIFPLTIPFTGNEETQPSESIVTGLLEITQDITDDYGYIIRFQWLILATCLSSSIILFILLQFFIVKAERILSERMTKNHRLEMELHQNEKLASMGRITASIAHEIRNPLGIIRSSAELLLRRAVDINPDNKQILTAIYDESCRLSQTVNDFLDYARPKIPKQELLNLNSVLEQVLGFLQGEATKRHITISKDISSELQLYGDTSLLYRALYNILINAFQSINKDGFIHINGEKNKDGFIELTFKDSGAGFPQDQIQHVTSPFYTTKDNGTGLGLPIANSIIQSHHGKLILKNDSNGGALIQILLPTSK

SEQ ID NO: 11124 - protein, 444 aa, Lawsonia intracellularis
MYYINWNHAWEGRLTQSLQSPLPIEEYITRLNQDLSDDILPFISMSYQEKLKQQINHITPLLHKFKYMVVLGIGGSALGAKALQKAFAPEQDRPNHSGNWLWIMDNIDSESMNALLTSLNPKKTLVVTISKSGETIETMAQYFLIKTWLQTTLKDSWQKHCLFITDPDSGFLRQEAQKENIQTLPVPKNLGGRYSVLSAVGLIPSAFLGIEWEELLNGANQIMLPLRHVTIQSLQKHPAWTIAKWCYTLLKNGYTQLIFFNYIATWSMFGQWFIQLWAESLGKSGQGSMPLSAIGVTDQHSTQQMFLDGPKDKGCILLSTKNYIPGPVFPPTIPENWSWLKHRQLNELIEAEKIGTAAALVTHDVPLLQLQFDNTNCYAAGELMGLLMTTTLFTGWLLHINPLDQPAVELGKRLARVKLGDNHYPKEAAILQSFLNTTSLEDPT

SEQ ID NO: 11125 - protein, 262 aa, Lawsonia intracellularis
MEKTIIYFPKGCVIGRFVKRYKRFFVNVLVDGEEVVAHTNNTGSMLGLLNSGTPVLLSPALNPTRKLQWTLELVWTGGTYPDENKLPSFPNKEGGVTPFHSGLGFWVGVNTLIPHKFFKLAFEAGLFPWTKGYSICNTETKIGMSRLDICLHGNGVPRLWVECKNVTLVENNVALFPDAVSLRGLKHLQELKKIIDSGERAATFYCVQRKDGKFFGPAASIDPQYTEMFWKVKKRGVEIYPYHIDITTKGLSLGPILPLLSE

SEQ ID NO: 11126 - protein, 366 aa, Lawsonia intracellularis
MSLLFRYLIKNNTKILLLTLTIGIGVYILTDLFERLDNFIEAHTSTKIILTYFIYKTPFAIAQILPFIFLISTVIQLCIMAKKKELIALQAGGISFTRIASIIIIASLFWGTIQFIFSEYIGTACGRKSLQIWQEYVHNQHKSKTILKDIWFTDKNWIVSINTLKPDDTGSGFSAYLLDKNGLTIEKIIWALSFSIHNNEWILKKVAVSEPALYSQEMLQELTLTFNQSSETLKFIQNNNAPQQLSFWELRETIHKLERSGSNVELLKTSWHTKLSYSFSLVVMALLATTIVAWKNNIYIAIAFSLLYTFIYNALNTIGISLGNKGIISPIIGAWIANLVIMSVTIWKLFFITPIKNFLLKIHSAN

SEQ ID NO: 11127 - protein, 384 aa, Lawsonia intracellularis
MIPLLQRQIFRESTYIFFLVVGALLTLIIINRAIQMRDLFIGLKLEILDVLILFSYMVPLFLILVIPIACMLGVFLTFLRMNLDKELIALKASGISIYQMLPAPLAFSFFCTLLTLWISLFWIAWGMEQFKTTLLDIARTKVKISIQPGVFNNNFPGFVLFARQVDPLSGELHQILLEDRSQKDRHLVILAPTGTIETNPTKGELIFNLTNGNIYTMSLNKTSFLSFDQYLVRIPLTTLLKNINFNELRPKEMSWERLIKEYNITNTMQYQNKISVELHKRWAYPAACIALTIFALPLAIMFEGIHRQFGLILALIMFFIYYGLMSFGFSTGESGTIPPAIGLWLPNILFFLLGLYGIYLTSREKTANIVYLIPNILRKIKGIR

SEQ ID NO: 11128 - protein, 230 aa, Lawsonia intracellularis
MNTTIIWHGHSNFQINANGISVLIDPFFTNNPRCTKNWNEIQKPDIVLITHDHSDHLGDAIAICKSTGALCGCIVGTADKLIQQGMPQHLIIGEIGFNIGGTIERKGVRITMTQSFHTSESGSPAGYIITMPNNFTLYHPGDTGIFQTMKTFGKLYNLHLSLLPIGGFFTMDSYQAAYAAKMLKCKMVIPMHWGTFPVLEQTPERFKNYLKAMAPECKYIAMEPNTSKEL

SEQ ID NO: 11129 - protein, 641 aa, Lawsonia intracellularis
MSIVIGTAGHIDHGKTSLVQILTGINCDKLSEEKRRGITIDLGFAYYVSPTGEKLSIIDVPGHEKFIKNMVAGASGIDVVMLVIAADEGVMPQTKEHIEICSLLGIKHGFIVLTKTDIVDKEWLEVIKEDIKLFLKNTFLHNTPILQVSSTTGEGIKNLKTHLNHYLSIPHSKQKTDIFRLPIDRVFTIKGHGTVVTGTIASGSIATGEAITILPSNKKTKVKQIQYHGNIVETAYAGQRTAINLHGINTSEVKRGDILAHPDTLVLSTRWLISLTCLPSSPRPLKHCSEVHLHHGTQEILAQLYFFNKNSLAPGETILCEIRLKKPLVGIFGDHVVIRTFSPLQTVAGGSIVNPIASPISRHTITDHTIDTLLSLPSATEEELVKKQIEFLDATGIYLTTLSIVTNIEHNRLLSILTSFIERGIIICFDKENYGYLSVNTMKTLVEQCLVAITNFHKKNPIKQGIEQGTFFTNYKIWGKILPHKLIGFIINQLIQKGNLTSEGNYIYLPSHTISLSFEQQHLYDNILKLYIEAGYTPPKLSNILTTLNSTIKQATPIITLLLERKALTHITEDMYYSTQAIKKLKSILQNWFNSHKELDIATFKELSGGLPRKYSIPLLEYFDKEKLTIRIGDKRQLRNP

SEQ ID NO: 11130 - protein, 485 aa, Lawsonia intracellularis
MTSDIHLSLAQIHNLLISREKSVEEVTQACLDRIIATEPTINAFITICAEEALSEAKKLDQSTPDPKKPLWGIPIAVKDNILTKNIPTTAASCMLKHFIPQYDAFIIQQLKNAGAIIIGKTNLDEFAMGSSTETSFFGPTYNPWNTKCVPGGSSGGSAASVAAFQCFSAIGTDTGGSIRQPAALCGCIGLKPTYGRVSRYGIIAYASSLDQAGPITRTVEDAAIMLSVLAKHDPQDTTSSFKATDNYYINLKKQDLTGITIGIPKEFISEHIDPPILDIYQQAIEQAKELGAKTIDLSLPHATDHAIATYYIIATAEASSNLARFDGVRYGYRAKNSHTLEELYINSRTKGFGEEVKRRILLGTHVLSTDYYENYYHKAAQVRYLILQDFLSVFKKCDILLTPVSPITAWEIGSTIKKPITIYHKDIFTVSLNLAGLPGLSIPAGLVKGLPVGIQLIGQAFDESTLLSIGNILHKYLGPTSQPNL

SEQ ID NO: 11131 - protein, 94 aa, Lawsonia intracellularis
MLTIEHLTYLAQLAKLNTSSETLKKFNDEYKDILHDIEKLVQVETTNIPALYNPSTIMQDNKRNDIPIPTPNPREFLTNSPEANEKFFVVPRIV

SEQ ID NO: 11132 - protein, 161 aa, Lawsonia intracellularis
MSIRINYANELQRQEETKKISKPIQGSSFENLLSEELTATSTINPSKVLSGKSSNVEQMLLMGLAKPKAAKFVKDATLTSITEQASILLNSWDEYSSALEEGITTRGAWEKLTTIENHTKNLQGNLANIQPPNSDLESMVNELSIMAVVEKAKINRGDYML

SEQ ID NO: 11133 - protein, 150 aa, Lawsonia intracellularis
MPVLNKIVCAIDLSEQSRTIADYAVMLAKMSNASIIVVYVAPTLTQYTGFHIPPNTIDSFVGEIVSGAEQAIKSFVDTHFQGVNAQGTVVVGYAAEEILSLAEIEKADMIVMGTRGRKGLDRILFGSVAEKVVKSSTCPVLTVHPVEESV

SEQ ID NO: 11134 - protein, 210 aa, Lawsonia intracellularis
MLKIISLKEAVNFINQGKLIIFPTETFFGLGCKIFNNEDTIQQIFIAKQRAINMPLPLIIGNWEQLTITAEVPQIIYPLLQHFWPGALSIVLNAKKNISPYITASTQKVAVRLSSHPIAKEIADLVGEPIIATSANINKNPPVTKITQLDIRLYPYIEGIIDIPPIPTGGLPSTLIELHPNNTISILREGIIKSNKVKEKAAELCGIISL

SEQ ID NO: 11135 - protein, 1340 aa, Lawsonia intracellularis
MNNTCVLSLINYIKLLYIIKFLNRYRLVKYINNINNNSKYLTKINIKSIPCILILLFSIVCIKVTITFAMDKNSDMNDKEASTPNISNFLKGLVPKKLHCYLDDEQTELDINVTAIKESQKTKNPSQKSIIINCTIIHPQLREPLIFGSYTQVNQSELELLKTLVQQPITIRQLAQLGLSGAESSNKLQTAAQLTSPLGSKRKYAPVSSTETLTTRTSSSIETSSIPQSTQSASSSIITTSNLEEPVVRPKIPSTKQGKNKAPLDKPQTLVTASKRSVFSLNLQLLENLGLQKIKAIYEEGQSTLHILLQTIKDLHREGQADKELTEKYRSMLEQQVELAKFIKEKEEEEEQQQIKQVMKRHENVQDLLEMLKKNISCSTSTPEQINFDLLSLPVDQLSQLDLTTLKNIFEPVESKRRTLEDQIRQQIKEGKQVDPTLQQKYQYLVTLQTDVLMATKNFSEEKLSQLPPTSGLAYRLQEVKAITQLLKEKIPPSPKSEDGNNIQFIILEKKDDRRSETSKTTVRINQQGIQTTNTKEKTKKKNLIATLDKSSSLLETDIEPPHSSEQQSSSSSNSTKKKKKEKKTSPVKTHTFSANIPSEEVITTTSISSEQTTVQMPLEAKTLVATGDKQQPSSSSHHKQKKKQTQTSTLSSNQSLLSIHANSPSPSIESTSQQSNAMPLKTKEAIENECTPDIPRKKKEKKKHLKHTPKNPSSSIPTCCEEEKTSTSNEDSTIPYPTLNRPEFEELKIPDTPKKKPKKKKKPGLGTLVGDSLLSEGRTTSTSDTTPIQPPSGFINQDHKDKKEALKNCPLSPPDEFSDDDNTKEDSGPMYIPGVFCGNNLDLESPRPKKPHTYLPNIIGDVTSITTETLETLDIYNSPLGEGEEDNEDPQKNVGENEEIQVAVRESEQSQAQQQQQPQCTNNTGTSPLGQNTPQHPIVAQTPAQPTPLPGNGRRARRQQTRQTQLLTKKHPSTNSLIAELLPEGQFSSLQSLQFALSDTSEFISETLKSLALKAHFSSKHLSTTTHKKLQLCLNNRKTSGSLNKSTIENTNIIEALQPTKSYTVFTSINKYTTNLENKLRSAQAGIMLNFSPTTNIGLAYNFNKKEYKEYSGTQLNSSNGSVKSKSTTDGLAAIFTLNPEKKGITGTMIGFYSWGKVTNSRRVTHGEKHIVTKGSPDITLTGGLIHLGYNIPAIKTLILTPYIGCLVSNVRWSPYTEEQSPVVCKISENRENLLEKSIGLKTKWELTEYSQLQTWIVGSSGLKQTNSLSSNSMITPLFKYTISAPSYKKKYTKAEGGLSYEVQLSPTLTLDIDGILSFEKRKKIEKKQHISFHFNYYY

SEQ ID NO: 11136 - protein, 157 aa, Lawsonia intracellularis
MSSKSLRLIVVGRLRIPFWRAAAEHYYKRISCWRAIYETIIKDGNSSLSVSQRKAMEGKNILAALEPIDIPICLDEKGKSISSQEFANFLRNYFENTTKRPCFIIGGAFGLDSSVCNIANDCLSLGNITFPHELARVIFLEQVYRAETLLRNIPYHH

SEQ ID NO: 11137 - protein, 565 aa, Lawsonia intracellularis
MKIHSSAWIIIGALGLWFGVENPICYIPGLIFFYPLSLIILGHNAPGKVDALRAGWILGLLGSSLSLYWLAVPIHTIGGLPWLLACPCVVLVGGSLGFFSGLFSFFVFCFHHIQFWQKSLMLGLVWYLIEWIKSWFFTGFPWLPFTMGFARYPVMLQCASIIGSYALSGLYVAILCLVFYSILYSQSKDIHKCSIKWPLIRALSVACILFISIVLFGYITLKTNPIDMNIQDGVTIAIIQGNDDQIVKWNPQTKYRSAQKYVRASEELLKNIFRLHEGGNTYYPDVFLWPETVILFDFKAEVEKGIHNPLTYFVNKYQIPVIFGAPGIETAGKDITIFNRLYYYSPGNYRLDCSESNKINKSLQWYDKEHLVPFGEYTPLFFNFPFLSQLLQEVGTYTPGEKVAPLLFEIKETVKKGSIACYRTISMGILICYEVIFPELARKRVAEGAQVFITVSNDSWFGHTIAPVQHLQIAQMRSIEFGRWMARAAVTGISAFIDPYGRIIDSTKIFIPTYLVGTIRPIIDNTVFFWIEPWLPTFAILVLCIMLWKNNLITHSCGHKSRGCS

SEQ ID NO: 11138 - protein, 362 aa, Lawsonia intracellularis
LKFFGGVFDQPSYKNRLSEIEKILSAPDAWSNPEALTPILKEKSQLEADNLRFEKLHLCHTEMIDWFELVQEFLTTNESSTEFLEALTALELQVKKFQDAMEEAEMYLLLGAEEDKMDAILEIHPGAGGTEAQDWAEMLERMYLRWADLHGFSKEEMDYLPGDEAGIKSVTLRISGENAYGLLKGERGIHRLIRISPFDSSGRRHTSFASVDVIPDAGEEVVIDIKDSDLRIDVFRSSGPGGQSVNTTSSAVRITHIPTGIVAQCQNEKSQHHNKESAMRILRARLYEQEIKLRDAAKQAQYMGKEAISFGSQIRTYTMQPYRLVKDHRTNCESSDVEAVLGGQIDKFINSYLLSTYRNNSL

SEQ ID NO: 11139 - protein, 91 aa, Lawsonia intracellularis
MNKSELVKSLSEQANISLDEATLVVNTFVDSMKESLLKGGRVEVRGFGSFKVKEYEGYAGRNPRTGEKVVVQPKRLPFFRAGKELKEYLNS

SEQ ID NO: 11140 - protein, 281 aa, Lawsonia intracellularis
MFSREDIPSIEFFKLHGCGNDFVFIDNRSLFIPKEKMSSWAEVICRRKRGVGADGIAFFELSTIAGADYMWHFFNSDGSRAEMCGNASRCMGVLAVKIGLANMQHTLSTDAGLISITVGDELQDATVTMTDPTNILLNVSLEVEKETQQVHFVNTGVPHLVVFHDNLIDYDIIPKGKLLRGHSHFSPEGVNVNFVKIESPNSMFVRTYERGVEDETLACGTGVCASVIIANQLGLVGTNVKVMTASKEIIELNLNNGKVLMKGPVVHVYTGQLQLSELGLF

SEQ ID NO: 11141 - protein, 301 aa, Lawsonia intracellularis
MEYVMGQIQFQGAITALVTPFKKGEIDLECYREIIEWQIEQGINGLVSCGTTGESATLTYEEYKLLIKACVEQTKSRVPVIAGAGSNDTAKAIQLTKIAKELGADGVLHVTPYYNKPTQEGLFQHFKTIASQESIPILLYNVPGRTGCNLLPETVARIVQDIPEVVGIKDATGNLEQFSEIIEFCPIGFQVLTGDDFTILPSMILGGCGVISVISNIVPAMVVELCSLIEKNKLEEARQIHYNLAPLCRLMFVETNPIPVKTALSLMEKLELEFRLPLTELSPINFTKLESTLKNIGIISK

SEQ ID NO: 11142 - protein, 387 aa, Lawsonia intracellularis
MLYIKKSLIALSFGTLGLGIAEFIIIGILPYIATDFGITIPTAGHLISAYASGVFIGAPFLIFVRRYPLKNILLALIVIIMLGNLIASIAFNYETMMLARFISGLPHGSYFGVGSIIAEKLSDKGKSTEAISIMISGMTVANLFGVPLGTFLGVTLSWRIGFLIVVGWGLVTFFYVWRWVPQIENVPDTGLKGQFYFLKRLAPWLLIIATILGNGAVFCWYSYIIPLLTNVSGFSPHSATLLIVFAGVGMVIGNFFGGVLSDRLMPIRIAIFIQGLLSIVLICIFFFSYIPWVSILLMILGTACLFALSSPQQLLLIKFSKGGELLGTSSAQMAFNLGNAIGAYCGGLPIQMGLGYQYSALVGVPFSVIGCFILYFFYQKFGMIKVN

SEQ ID NO: 11143 - protein, 260 aa, Lawsonia intracellularis
LPLIGADSHAHLVFPELFTRLSEVIKRAASAGVAFLGNVFLSIQEYQEYNEVLKTIPGIFFLLGIHPCDAMKFNKNILKIMYDLFRCDEQLKAVGEIGLDFYHKDCTATLQEEVFRAQLNFAREMRKPIVIHSRDAARDTIRILESEGCIAYPVLWHCFSGDAVSFLDRILSNGWNISVAGPVTYPGNKELQEVIPMIPEDKLLIETDCPYLSPVPWRGKCNEPALVVFTAAYIASLKKIDIIELWTQCGENTKKFFMLS

SEQ ID NO: 11144 - protein, 213 aa, Lawsonia intracellularis
MSITPLKNSYVSTNYEKKSSTENLHSNTETKNTEAVKNNSQRTQKNNNYLSSNPISWLQQAVSATMDGMGLGPTDKISFSTIISYRDQLQNEFDTKVKEGLKEAGLDENVKFQLVSGDEGGIKVIADSPEKEKVEKFFEDNPDLVKQFEKIQALNNVEESRKQQRIDVNAIRQRVQVESMMAWYSGSGGGGISSIMDFSGGQTSFFSGINKHV

SEQ ID NO: 11145 - protein, 133 aa, Lawsonia intracellularis
MAVILLGNEHIWKLPFCRLEFVAILEKMLSFAKLQTIEVYLVSDTTIAFFNLHYMNCLGITNVLSFPMDDEDLAGSIILSVDAVCRESLLYRQPILDYCLSLLSHGIAHIAGYTHGVEMDKFCSNLLLPFKLA

SEQ ID NO: 11146 - protein, 105 aa, Lawsonia intracellularis
MAEVIYKGKNFEVDEDGFLLNFENWGPEWVDYVKESEGISEVTDAHRKIIEFLQDYYKKNGIAPMVRIISKNTGYKLKEIYEFFPSGPGKGACRMAGLPKPTGCV

SEQ ID NO: 11147 - protein, 340 aa, Lawsonia intracellularis
MKIIHSAIFAVTLLTAWSTVCFAAEVTASCTKRVESYNYLVDYSGSMMMKHVAVREPKIELAKEAILKINAAMPKMSYQGGLYTFAPYSVIIPQGSWNSCVAECAVNTIKSDLEIFGRLTPMGDGIKMHETVINQMPPQAAVILLTDGHNNLGMNPVEEVKSIYQTNPNVCFHVVSFADDAEGKAIIDQIVALNSGSVLVDGLQLLQNPAVCQEFVNSVFCQEQILVTEEVVVLRGVNFAFDSFALDDTAKAILEETVRLIRANPDFNVRLLGWTDSTGPDAYNLRLSQERADAVKNFLVKMGIPSNRLFAKGMGKSYQYNNATKEGRYMNRRTELVFFD

SEQ ID NO: 11148 - protein, 156 aa, Lawsonia intracellularis
LDSSPFFVKGFYMKKFFFFLVMLIPFLSIIPQVEVLAKVNIQSEQEVKEKLEHFAKEYLCQANKNLKCNRDAKFITKVGDEFIAKFHEVDIDSLSIELYPSSSSKSILYVGYVIYIEKCYECRAKTKVEAEQGNFKVTAGRRVRELARFTNGKWII

SEQ ID NO: 11149 - protein, 1388 aa, Lawsonia intracellularis
MSLDELFTVRSTATANATQIRNLKAIQISIASPENIREWSYGEVKKPETINYRTFKPERDGLFCAKIFGPVKDYECNCGKYKRMKHRGIVCEKCGVEVIASKVRRERMGHIELAAPVAHIWFLKTLPSKIGTLLDMAMADLEKVLYFDSYIVLDPGSTNLTKMQVISEDQYLQVIEHINEESFVVGMGAEAIRGLLEELNLETLRNSLREESQSTKSQTKKKKLTKRLKVVEAFIESGNRPEWMIMEVIPVIPPELRPLVPLDGGRFATSDLNDLYRRVINRNNRLKRLMELGAPEIIIRNEKRMLQEAVDALFDNGRRGRAIAGTNGRPLKSLSDMIKGKQGRFRQNLLGKRVDYSGRSVIVVGPKLKLHQCGLPKKMALELFKPFIYSELEKRGHASTIKSAKKIVEREELVVWDILSDVVREYPILLNRAPTLHRLGIQAFEPLLVEGKAIQLHPLVCAAYNADFDGDQMAVHIPLSVEAQVECRVLMMSTNNILSPANGSPVIVPSQDIVLGLYYMTVERSFEKGEGMVFCAPWEVISAIDNNQVNIHAKIKVRMEDGNIYNTTAGRILVWEGLPKGLKFEYVNCVLTKKNIATLVGNAYRDAGIKATVILCDRLKDIGYEYATRAGITIGVKDLIIPATKKTIIDTATSEVDDIERQYRDGIITRTEKYNKVVDVWTKATQDISSEMTKEISTEVVKDPKTERTEVNQSFNPIFMMSNSGARGNQDQMRQLAGMRGLMAKPSGEIIETPITSNFREGLTVLQYFTSTHGARKGLADTALKTANSGYLTRRLVDVVQDVIVYKNDCGTVDGIEVKQVQDGGEIKQNLSERILGRVLLYPIYHPVTNEIIFPENTLIDEYVVKKLEEIGIASVTIRSALTCQSERGVCALCYGRDLARGHLVNIGETVGIIAAQSIGEPGTQLTMRTFHIGGTASREIERSNFEALHSGRIVLTRVKSVENRDGVHLVIGKSGQLSIVDEQGRERERYSLPNGARLYVKEGQEVTKGTFLAEWDPFNEPFVSEVNGFIKFTDLIDGKTYQEKLDEATHQSSMTIIEYRTTSFRPSISICDAEGQTKQRITSTTPAIYSLPAGAIIMVKDGQEVQAGDIIARKPRETSKTRDIVGGLPRVAELFEVRKPKDMAVVSEIAGIVTYAGESKGKRKLIVTPEIGDPKEYLIPKGKHINVSDGDFVEAGDLLTEGHPELHDILKTRGEKYLAAYLVDEIQEVYRFQGVGIDDKHIEVIVRQMLRKITVTNPGGTTFLVGEQVDKGDFKEENQKIVEEGLEPATAEPLVLGITQASLTTSSFISAASFQETTKVLTEASLKGKMDYLRGLKENVIVGRLIPAGTGYREYMELDIVVPEQKERPNKFLEELEERPVLIEIDS

SEQ ID NO: 11150 - protein, 1373 aa, Lawsonia intracellularis
MVQLTKQFGKIKVEVPIPHLLNLQVDSYKKFLQEGLLEPLPEEGLESVFRSVFPIEDFNRTSSLEFVNYKIGEPKYDQAECIAKGLTYEAPIRIKVRLIIYDVDSDTESRTVHDIKEQDIYFGTLPLMTEKGTFIINGTERVIVNQLQRSPGIIFEHDSGKTHASRKVLYSCRIIPMRGSWLDFDFDHKDILYVRIDRRRKMPATILLKAMGMGKQDILNFFYKKETYILDNDGRIKWKFDPSLFRKDIAYTDILDNDNNLLVAAGKTITKRVWRQMEASGLEAFEVDPSTVIGQFLAEDIIDTSTGEILAESAEEITEGLIQTFRDAGITTFTVLHTRGNDTSSSIRDTLVQDKIPTTEKAQEEIYRRLRPSSPPTPEIAASFFDNLFRNNSYYDLSPVGRYKLNQRLDNYENATLRTLSDNDILEAIKLLTHLKDSHGPADDIDHLGNRRVRLVGELVENQYRIGLVRMERAIKERMSIQEVATLMPHDLINPKPVAALLKEFFGTSQLSQFMDQTNSLSEVTHKRRLSALGPGGLTRERAGFEVRDVHVSHYGRICPIETPEGPNIGLIVSLTTYAKVNDYGFIETPYRVVRNGYVTDEIIHLDASCEFSEVIAQANASIDSEGRLIDDYVTTRARGDVLMSAREEVTLMDISPSQMVSISAALIPFLEHDDANRALMGSNMQRQAVPLLRSERPLVGTGMEVDVAHDSGSCILAEGDGIIRYADANRIIVSYDDPNLYPEFGGVRAYDLLKYHKSNQNFCFGQRPSCIPGQIVKKGEVLADGPAIRDGGLALGKNLVVAFMPWCGYNFEDSILISERVVKEDTYTSVHIEEFEIVARDTKLGPEEITRDIPNVGEEMLSNLDENGIIRIGAAVKPEDILVGKITPKGETQLTPEEKLLRAIFGDKARDVKNTSLKVPPGIEGTVIDVKVFNRRSGEKDDRTRLIEDYEISLMDSKEQNYIKSITQRMKEKILPLINGKQLGTTILGKGKGEVLAEENSAITPELLDSLPLKKLEGAFKSKELNETITEMLSQYEKQINYIKTIYDSKRGKVTEGDDLPPGVIRMVKVHIAVKRKLAVGDKMAGRHGNKGVVSCILPEEDMPFFADGSPVDIVLNPLGVPSRMNIGQIMETHLGWAAKELGQQLNNMVEQGVAIQSLREQVKSVFESPEISAEIDAMDDDTFRTSVQKLKKGIITMTPVFDGAGESEVWDWLAKAGLPSDGKAILYDGRTGEAFKNRVTTGVMYILKLHHLVDEKIHARSTGPYSLVTQQPLGGKAQFGGQRLGEMEVWALEAYGASYLLQEFLTVKSDDVSGRVKMYEKIVKGDNFLEAGLPESFNVLVKELMSLGLNVTLHQEEGKKKPKRTGLIDKE

SEQ ID NO: 11151 - protein, 430 aa, Lawsonia intracellularis
VQEESSKELYSKAVKLIPGGVNSPVRACRNVGCEPVFIESAKGAYLTTVDGQELLDFVLSWGAIILGHTNSTVTNAIKKAASNGTTFGAPCKAEVLLAKEIIDAFPGMDMIRMVSSGTEATMSALRLARGVTGRNKVLKFIGCYHGHADPFLASAGSGVATLSIPGTPGVPEVTVRDTLLAPYNDLSTVKDLFVMYGKDLAAVFVEPIAANMGLIPPKEGFLKGLRALCDAHGTLLIMDEVITGFRVAYGGAQTRFDITPDLTTLGKIIGGGLPIGAYGGKAKYMEHIAPLGEIYQAGTLSGNPLVMTAGFETLQLLKDINYTILEKQVATFANELEVILKDKGVPVQVSNFASMFTVFFTNNELKSFDDVKTTNTQLYSILFRSMQKNNIFLVPSPFETNMVSFAHKEKEFEKALIAAKKIMFNITDVN

SEQ ID NO: 11152 - protein, 166 aa, Lawsonia intracellularis
MSYSFSEIECAILRMVQNNIPDSMTPYADIANAVGTEEHFVLELLQQMKDDSVIRRFGASIKHQQTGWEHNAMVAWKIDDTLIDEAGEQAAQHPSISHCYHRPSTAEDWPYTLYTMIHGRNKGDCEKVIEQLKNKTVLKDYAILESIKELKKTSMKYFQLVNERNI

SEQ ID NO: 11153 - protein, 363 aa, Lawsonia intracellularis
MLATQKLSDPVLCKVLLNKLNNLLDRPLRFMEVCGTHTVSIFKSGITTLLPKGIDHLSGPGCPVCVTHDSEIELFLRFAAKPNVIIATFGDLMRVPGPNRKSLKHAQAEGARISIIYSPMDILKIAIDNPKDIVILPGIGFETTAPTIAATILMAEKEGINNIAVIPCHKLVPPALEMLLADPDCQIDGFLLPGHVSMVLGLEPYAFVVEKWGKPAIVAGFEPADILDALCRMAKQLQTGKYKVENAYPRAVYQDGNPQARNILYKVFQVGDSQWRGLEFLPMSGLTFRDHYKKFDALERFDITGVNVHPNTGCICGEILKGKVTPSACLLFGKECTPEEPIGPCMVSTEGSCAAYFKYHMIR

SEQ ID NO: 11154 - protein, 259 aa, Lawsonia intracellularis
MKYVLIDPIAFSFGSFDVHWYGIMYLIGFLCAWILGRYRAKKSYSILTTNDVGDLLTWGMIGVIVGGRFGYILFYDFNILYTDPLEVFKIWNGGMSFHGGFLGATVAACIWGYKRQLHCLAVLDFLSPLISPGLFFGRIGNFINGELWGAITDKSWGIVFPSGGPYPRHPSQLYEAFFEGIILFIIMWSYTSKPRPEGNPSGLFMLCYGLFRFGIEFIRQPDAHIGYLAFGWLTMGQLLCVPLIIIGFWLITRHRQTHT

SEQ ID NO: 11155 - protein, 225 aa, Lawsonia intracellularis
MEQHTIITIDGPAGVGKSTLAKKLGTILNLPYLDTGAMFRKLALQLGNKAETLPDSILQEQCKKVTFQLQGVGKNSLLMCNGESIGHEIRSETAGILAAQLGERTIIREYLKNIEQQIGNTMSIIAEGRDLGTEVFPKAQFKFFIDANPIIRAQRRFNQLKKEGIFQDYNDILHSINYRDKLDKNRTIAPLEPAKDAILIDSSIMDIDSILKIMLNYITIPHLSQ

SEQ ID NO: 11156 - protein, 298 aa, Lawsonia intracellularis
MYFPTAGVETSFFIPPLASFIVSFFMSMLGLSGAFLLIPFQISFLGYTNPSVSSTTQLYNVISNPVGALQYAREHRMIWPLAWIIIFGGIPGVMVGALIRITYLSDSQSFKIFVATVLLIIGAKLTQSLLSSFFPKKSIHPLINIKSSSTKVIQKSLRQISYTYANNSYTFSVIKTFLLSLLVGIIGGIYGIGGSAIIVPFLTSIFGLPIHTIAGAALMGSGVISVISVLFYSFLALLYPNISVAPDLLLALLFGIGGIIGMYLGAYCQKFIPGIWLKLFMILVIFSVAVKYTLDYFQ

SEQ ID NO: 11157 - protein, 633 aa, Lawsonia intracellularis
MGKIIGIDLGTTNSCVYVMEGKEPKCITNPNGGRTTPSVVAFTDKDRLVGDAAKRQAITNSARTIFAVKRLMGRRADSPEVVHWKEHAPYKIVAASNGDAAVEIDGREYSPQEISAIILSKLKADAEAYLGESVSEAVITVPAYFNDAQRQATKDAGRIAGLDVKRIINEPTAASLAYGFDKKANEKIAVFDLGGGTFDVSILEVGDSVVEVLATNGDTFLGGEDFDQRIINYLVEEFKKEQGIDLSKDNMALQRLKDSAENAKKELSTAMETEINLPFITADQSGPKHLLIKLTRAKLEQLVMDLVGRTIEPCSKALEDAGLQTSNIDEVILVGGMTRMPLVQKKVAEFFGKEPNRSVNPDEVVAMGAAIQGGILAGDVKDVLLLDVTPLSLGIETMGGVFTKLIDRNTTIPTRKSQTFTTAADNQPSVSIHVLQGERPMASDNMTLARFDLTGIPPAPRGVPQIEVAFNIDANGIVNVSAKDLGTGKEQSIQITASSGLSEADIEKLIREAESHASEDKKKQEIIEVRNHADGLIYSTEKSIKDLEGKIDAELQADITSKIEALKKVMEGEDSAAIKKATDELASASHKLAEQLYKQTQETSGASGDPTDTSASSSKSGDDVVDADFTEVK

SEQ ID NO: 11158 - protein, 471 aa, Lawsonia intracellularis
MHEFRKEHDSLGEVLVPIEAYYGCQTLRAVENFQITGEVIGKYPSLITSLAQVKQAAALANNKLGLLSDKKKDAISAACNEIINGELLDQFVVDCIQGGAGTSTNMNANEVICNRALELMGHEKGEYQYLHPNNDINMSQSTNDVYPTALRIALIKELKSLITSISYLCDTIDKKADEFKNIIKIGRTQLQDAVPMTLGQEFRAWSIMMREDIERIKETSKLMQEINLGATAIGTGINTVPQYKELATTYLTEITELTLTSSPDLIEATQDTGAYVQLSGVLKRVTVKLSKICNDLRLLSSGPRCGLGEINLPPRAPGSSIMPGKINPVIPEVVNQIAFKVIGNDITVTMAAEAGQLELNVMEPIIAYSLFQSINIISNGCYTLADKCFNGIIANIEKCREFVDNSIGIITVLVPFLGYEVCSTIAKQAFETGKSVRTILLEQGHITQNELDEMLKPENMIHPIPFKMKVM

SEQ ID NO: 11159 - protein, 295 aa, Lawsonia intracellularis
MAVIACFTWIHNIYAAPRKLKKKESLSRAPFQKNNRHGKLKSSQRQENITTLTEEEIRDYFLKMRNFDKPFPTDIILQAKEKALLDSSMAKLTAIQDIVGHGRFYLLSVDEAINVAKRSSIENFSKKEILFLEELFYVDASNYGFMDKKPLNSFTATIPQHNVYKVPGMGNFIYKGLAQKKWAEIQKIIGKDVVLTSGVRGIIKQFYLFLAKAQKHNGNLSLASRSLAPPGYSFHGIGDFDVGQRGFGYRNFTADFTTTSVYKQLSVSGYLSLRYPKDNFLGVRFEPWHVKVHSS

SEQ ID NO: 11160 - protein, 307 aa, Lawsonia intracellularis
MVQKTEYIWFDGEFIPWDQAKIHVLSHALHYGTGAFEGIRAYRCIDGTSAIFRLSDHVKRLFHSIKILGLRIPHLEEDISSAIIDTLKINKLTEGYIRPLSFVGEGIMGVHPGDNPIKTIIAVWPWGAYLGEEGLKNGINVKTSSFVRHHVNAMMTKAKLSGNYVNSVLAKMEAKSSGYDEALMLDSAGFVSEASGENIFIIRDGVIKTTPLTSILGGITRNSVISIASDLGYTVIEQQFTRDELYISDEAFFTGTAAEVTPIQSVDNRIIGEGKIGSITHAIQKKYFSIVKGEDPFYKNWLTFFTI

SEQ ID NO: 11161 - protein, 574 aa, Lawsonia intracellularis
MKQVSLAIRYRPQSFKEVVGQEIVKKILSRAAAESKVVPAYLLSGTRGVGKTTIARIFAKALNCQQAPTAEPCNTCEQCKRITKGIHVDVVEIDGASNRGVDDARRLRESIAYAPMEGRYKVFIIDEAHMLTRESFNALLKTLEEPPPFSTFVFATTEPHKFPVTIISRCQHFVLKPLTKEELIYNLIHVLKQENICYEDNAIQLIARRASGSIRDSMSLLGQTLMFSNGILTENVVRNVLGLAEQEFYEKLLRAFKDQNYEEVVKLNQILLEKGVDLGFFLREFATLWRNLFLLRKVSKLDANMLGMLPDEIPRLTSLANLFEPIYLHAAWQMVLENQRQILMSLEPPVALELLFLNLTLLPHLVSLEQISNGLAALSSTSLETEISNKLRDNSMKKDVISASTESESISNTKFQNEYQEVVEGDLQFISVKDVKSKRDTISSSMNEGEIIEEPTWEGFLQYCSKNGSTINTYFLNKLTGIFQQNTLVITVDSQFLYEKLISDKLEKLYELVHNYAGEKYTVQLIEPKNTFKLETEIKKDIVSHPVIQILQQTFDAELLRCTPTTNLHIKPNK

SEQ ID NO: 11162 - protein, 103 aa, Lawsonia intracellularis
MQNMNELVRQAGLMQNKIANLQREMGDRTIEATSGGGMVKVIANCKQDIKSIEIDPKVIESGDIEMIQDLILTAVNEAIRISRNTMEKEISAITGGMQLPGIL

SEQ ID NO: 11163 - protein, 203 aa, Lawsonia intracellularis
VDQHIPEILRTVIGQLTKLPGLGPKSAMRIAMTFLKWPESETRSLGKSIYELRDKLGLCSSCGALSDSNLCFVCADSERLDNLLCIVSEWDSMVTLEEVGFFQGRYMILGGLLAPLDNMGLDKLEIDRLIDRLNKGEVKEVILALGSTIEAETTATMIYSLISKRFPYIRVTRLAQGIPLGAEVKFMDRETLRQSLQYRQELS

SEQ ID NO: 11164 - protein, 196 aa, Lawsonia intracellularis
MEQVQTISSSNSTFSNKTIPNHYLVLDIESRYSAEEVGGWQFAEKMEISIAVTYDSTTDTFTSYTQETIFPLFQRLKKADLIIGFNHTTFDYAVLQPFAPYNLQNLPSLDLLKEIKKSLSHRISLDNLAQATLNIKKTANGLQALQWWKEGNLENIIEYCKNDVSITNKLFLFGHSNQYVQFINNDNQCIRIPVDW

SEQ ID NO: 11165 - protein, 299 aa, Lawsonia intracellularis
MFFGNYHIILLKEKNGTSKNLYIKGWLGSSLCIFLGVVIISNILLWQQYQNTNILQRQLSESERTIETQNTQLMGLVGKISSLQEDLSRVQRLDSKLRVIVNIEKDIEATSIGGSRTEEFSRTYLPLHRQELMVRKLNNFLKQLSEEVRLEEVRQQELLQTLRDKKEALASIPSIWPISGFITSHFGNRPSPFTGRIEYHKGLDISAAIGTPIQASGNGRVILAGCDGAYGNCVVLQHGSGLTSRYAHMSTVDVKVGQNVRRGQIIGYVGSTGRSSGPHLHYEVKVNGMNVDPLRYILD

SEQ ID NO: 11166 - protein, 428 aa, Lawsonia intracellularis
MRVLVIGSGGREHALTWKLKKSEKVSEIFVAPGNGGTAKCATNIPIKEDNIQELVKFVKEYCIDLVIPGPELPLTLGISDAMKAIGVACFGPSRWCSQLEGSKAFAKQLMVQLGIPTANYGIFHHIDDARDFIKNTGTPVVIKVDGLASGKGVFVSHTEEDALKALEYIMDKKVFGESGATIVIEEFLEGEEVSLLAFCSGDVVLPLPSVQDHKAAFDGDVGPNTGGMGVYSPAPCLPKDMLEEMANLTILPIVKEMSKQGHPYVGILYAGLMMTKDGPKVLEYNIRFGDPECQVLMMRLENDLITLIESCLTGSLSGINLKIHSSSALGVVIVADGYPDTYPKGMLIEGIEKVKEQKGIEVFHSGTQLDNGQFYSNGGRILCVTSFSSTLLKAQQDVYQALKMIHIEKTRYRTDIGLKGLRYKNETC

SEQ ID NO: 11167 - protein, 171 aa, Lawsonia intracellularis
MKHVKVAIFIGSPSDESIVSPCTEILTQLNIPYIFTVSSAHRTPERTAELIDSLEANGCEVFICAAGMAAHLAGAVAARTLKPVIGIPITSSSLGGMDALLATVQMPSGYPVATVALDTAGARNAAWLAAQILALHDSKIKKQLDAARKKFKDDVLSVSKSIEDKYTSIIS

SEQ ID NO: 11168 - protein, 210 aa, Lawsonia intracellularis
MGSIVKMFQWLRKTVFWEYLEAIFWAGCMAIILTTFVIQAFKIPSGSMLETLQIGDHLLVNKFLYGLKNPFSDSYLIKGIDPKVGDVIVFRYPKDTSVDYIKRIVGVPGDILEMKDKILYRNGEKVVEPYVQHSQEDIIVPVRDNWGPIVVPSESYFVLGDNRDDSLDSRFWGFVNQKNICGKAWIIYWSSQGLHNIRFDRIGKFIHEDN

SEQ ID NO: 11169 - protein, 106 aa, Lawsonia intracellularis
MFNSYIGAILIAAGLDIIANLMLARSQGFKKIYYGILSLICVGLAFLALAYATQGLDLAVAYAMWGGFGILGTSLGGWFLFGQKLKPSAWIGIIILIGGIVSLNLA

SEQ ID NO: 11170 - protein, 125 aa, Lawsonia intracellularis
MQPRQYTSQVKHWIYLIIAILLEVIGTSVMKLSQLGTWIFEPNIGYLLMLICIGLSYYMLALAATGLPIGVAYAFWEGLGLILITLVSIFVIDEKMTITRLISLFALLSGAILIHHGTVNISSNN

SEQ ID NO: 11171 - protein, 663 aa, Lawsonia intracellularis
MNIKLHLPPFIYTITKFLFLIWGILILARISMFILLYDALSNIPFSQILYAFYIGSKFDIRIAVIISIPLCLLLLSPYLEKRLPKYIPYILSLYGLIISLVLILYITDFGYFFYLRQRLDATLFDFLTTPIISLHMVWESYPIFWISIAFCLTLSLCLFFIYLILKSNKITMLSSFPRGCWTIITLIILFLFAYGQINTTLFPLRWSNAYFSINKDLAILGLNPIQNLYDTYKIMSAIPPDIAATHTSYPRIAEWLNVTNPNEKNLNFIRVIKGHKQSTPINIVIIIMESLAWPRTSLAPGEDNPTPNLKKLAKESLLFPFFFAPARTTARAIFTTMTGIPDVNRSGGTSSRNQKLIEQHLIMNEFKGYEKYYMLGGSASWANIRGLLDHNIEHLQLFEEGKWNSPSVDVWGISDLDLFREAIKIFNNSPLPFIGVIQTSSFHKPYTIPSDNAGFIKLNPTPELLANYGYTSDEEYNSMRFADHALGEFFALAKTQPWFQNTIFAIFGDHGLNDPSLNMTPGYLACRLQSNHIPLLLYAPGRIQPGEYPYPCGQPDIFPTLASLAGITYHNQTMGRNLLDPATHHDSKQFIAGETEAFIRLVQDGYCYIKEETEGLYFLADTECNNLIEKESERTQSMRQAATDFFAIAKYMLYNNKRPNKEN

SEQ ID NO: 11172 - protein, 504 aa, Lawsonia intracellularis
MFYHTLIITIGAFFSKLLGLMRDVSIAWLLGSTTTADALTIALRLPFFFRRLLGEGSLSIGLTSICRHESICSNSGIQLTLRIAVIFALIIGTISSVVWFIPTIALDILAPGFNWEHTVHSETIQLFRICLPYIIFAILTSGCIAVLHSERHFLLPALSPVLFNSSVIIFALISIGYTPIDRGVFLSYGVLCGGIFQWMSQLPLALYLKKAEPKVDYNISILTKNVLKIPKNIFIASIPQLTFILATALTSFLPTGHVASLFYAERLIEFPIGILSSAIGIVALPVLTTIYRQNKLSIFGDEVSKNVSLILAINFPAALGLIAISMPLVQAIFYHGEFNFQAVNITTFALCAYAPGLPAIALSKTLLSTYYAINNQTVPFYVGMLTITLSFLLGALLLYFFNIIGPPLAASLSLWFYCWLLWKKLHCFIPVHFPFKKVSLQLLAACCTFILCYTTVYFLSDGVPVITICLVVPIGIISYVASLYLLDKKQLIQIIKNIRYPTSI

SEQ ID NO: 11173 - protein, 371 aa, Lawsonia intracellularis
LNPPGTFHITATDGSARTGVLYTAHGIVNTPIFMPVGTVGSVKAIAPDDLEAISAEIILGNTYHLYLRPGDELIARRGGLHVFNAWEKPILTDSGGFQIFSLSSLRKLHKDGVIFRSHIDGSKHVFTPERVITIQRNLNSDIMMVLDECVAANADYTYTAQSLDLTIHWAKRSRDVYPKGEGDNLLFGIVQGGMFKSLRHSSVSQLIDLDFDGYAIGGLSVGEPKEIMMELLYDTAPLLPKTKPRYLMGVGTPLDILKGIEAGVDMFDCVLPTRNARNGTLYTSQGKLNIKRKEYAEDDLPLDENCSCYTCQTFSRAYLRHLFHSQELLAFRLNSIHNLTYFLNIIFGARKAIHGGYFFNYKQQVEQLYCN

SEQ ID NO: 11174 - protein, 381 aa, Lawsonia intracellularis
MPTLSIVIPVYNMGYWLPIAIESCLWQSHKKIEVIIVNDGSTDNTQEVIEHYSSITNTIRYHTQPNKGSGIARQVGQNLAKGDFITWIDADDFLAPMAAEQLLKIAIQDNVPLVCGNAVTFSDKTLNTRANNPHDEIHHTTFCENPDYWECNTIGRWIFSLPFLNNGKAGRPFLHPNFKLSLGSTCFIFDVLSSNVPFSQCIDELYFIRQEHKYLLPSPELLVEQKLVHYLEVKSILLDANAIKPFINYLNKNYWNDLKMTLPYMNTQNIRWLNRIIEISFELFADLNIKWFSDDYLHPEVDAEPDLLPFAEACINKERKKVIQLLLPLVTSSPQPNNSQGIFQTLRSEIQSLFYNRSKRTKNYLQALEKLVSNRIITNSL

SEQ ID NO: 11175 - protein, 128 aa, Lawsonia intracellularis
MSVTKEQVIEFISNMTVLELSQFIKELEEKFGVSAAAPAVGMMMAAPTAASAEAEAEEKTEFDVILKEAGANKIAVIKVVRALTGLGLKEAKDKVDGAPSTLKEGVSKEDAEEAKKQLTEAGATVEVK

SEQ ID NO: 11176 - protein, 172 aa, Lawsonia intracellularis
VNRSEKAALISQIKAKADTASFVVVTDFKGISVEELTCLRAKLRESGGEYLVVKNTLARIAFTDGIHSIIKDQFKDNCAIAFGYNEPVAIAKTINDFVKTSKFITVRHGSLEGTLLTTKDIEDLAKLPSKPELIAQTLGTLNAVPTNFVSLFANIIRPLFYALQAIEAKKAA

SEQ ID NO: 11177 - protein, 235 aa, Lawsonia intracellularis
MPKLGKKYRNAVKGVDLSLHLSFEDAVTQSIQTSFANFDETVDIAIGLGVDPKYSDQMVRGAVTLPYGLGKTVRVAVFCKGEKEAEAKEAGADYAGAEELVAKIKDGWLDFDAAVATPDVMALVGQVGRQLGPRGLMPNAKTGTVTFNVTNAIKELKAGRIDFKVDKAGVLHAPLGKVSFGSEKILGNLKSLVETVNRLKPSSAKGTYIKSMAISTTMGPGFKIDTNLVKKFLES

SEQ ID NO: 11178 - protein, 140 aa, Lawsonia intracellularis
MAKKELAKIKLQIPAGVANPSPPVGPALGQHGLNIMQFCKEFNARTQDQKGMIIPVVITAYADRSFTFITKTPPAAVLIMKAAKIDKGSGEPNRNKVGKISIEQVEEIAKLKLPDLTAKDLDSAKRSIIGTARSMGIEIK

SEQ ID NO: 11179 - protein, 194 aa, Lawsonia intracellularis
MTEHNEPLAQANKTADPGKSRWYIVHTYSGFEQRVEATIKEMMRSGQDEGLIHEVVLPTERVVELGKGGLKRTTTRKFYPGYIMLRMTMTDYSWHLIQTIPKVTGFVGGKNRPAPMKDEEASKILSLMETRQEQPRPKFSFERGDEIRVIDGPFGGFNGIVEDVNYDKGKLRVSVSIFGRQTPVELDFIQVSKG

SEQ ID NO: 11180 - protein, 397 aa, Lawsonia intracellularis
MAKEKFTRNKPHVNVGTIGHIDHGKTTLTAAITKVASMKMGGKFVGYDEIDKAPEEKERGITIATAHVEYETPKRHYAHVDCPGHADYIKNMITGAAQMDGAIIVVAATDGPMPQTREHILLARQVGVPYLVVFMNKCDMVDDPELLELVELEIRELLSTYGYPGDDVPVIRGSALKALNSDSADSDDAKPILELLDACDSYIPDPQRDIDKPFLMPIEDVFSISGRGTVVTGRVERGVIKVGEEIEIVGIKPTIKTTCTGVEMFRKLLDQGEAGDNIGVLLRSVKRDEVERGQVLSALKSITPHRKFKAEVYVLSKEEGGRHTPFFSGYRPQFYCRTTDVTGVITLNEGVEMVMPGDNATFNVELIYPIAMEQGLRFAIREGGRTVGAGVVTEIVE

SEQ ID NO: 11181 - protein, 909 aa, Lawsonia intracellularis
MPQNSIYASNNKKKTQFMKKRLFFIFSIFLLGVFMATYMVQPLEATSSIIKTNDILPENLTKKHPIVTRLCNGLTVLVLEDNRFPLVSTRLYVHTGSAYEKPEQSGISHILEHMVFKGTESRPNATISQEVEAVGGYLNAATSYDYTVYKTDMPSSQWKLGMDVVRDMAFHPMLDPQDLESEKKVILAELARGEDNPHSFAFKKLLAKSLAGTPYSRPIIGYPETINAVTSQDLKDYIATHYQPQDMLLVVVGDVKANEVLQEANHLFSKYNNTQNIILPLPYYAEELPLKEGQGTVTIIPGTWNKIYLTAAVPVSNALNIESNTLDVLAQLLGGDKTSLFYRTYKHEKQLVEDIQVTNYSFERTGVFLITAEVEISKIRPFWDTLTKDLANLSAKKFSQQELDRAKLNLEDNLYRTKETLPGLASKLGYFEFFLNGEEGEKNTIEAIQSVDIDMLDEAISKWIRPERFAAVVLPPKDVPMPNLQATLEKNWPKKHEEATVVNQSNNKEEIVKLGKKTVVLIPDNTLPYCSVTLLFSGGDALVSDEQQGLPSLTATILTKGTSNKTVIEIQNFLADRAADLSASAGRKTFSVTFTGPSKFNNELFPLVLDIIKNPVFFQPEVSRGIQDQLAAIKSQEDQPLGLAFRKTPPFLFPHSVYGYMQLGNPEVIKKFTQQDIKKFWEKQIAQPWVLAIAGQFDREKVLQFVRDLPEPIEDKIVVPEPSWGKERELDINIPGRNQAHLLLIYKTVPDTNPETPIFNVMETILSGQGGLLFRDLRDEQALGYTVTAFNRQTTETGYLGLYIGTEPNKISVAEKGFKDTIQQSLIDKLLPETELNRAKNQIEGEYYRERQSLGSRASEAAMLTLENRPLNYAMEQVKKATHVTAQQIKELAQRYLLSEKPYIVKILP

SEQ ID NO: 11182 - protein, 425 aa, Lawsonia intracellularis
VFSLEKNKVLSELISKHIDKIALEERLTSEQINLGICSGTMVLLGNLKHSDVKPTLIGQPARIKVNANIGTSPLESSFNKEMDKLKVAYEAGADTVMDLSTGGDLYKIREEMLAGTSLPLGTVPLYAVAQKYIKKHSDPAKMDPEELFEEIERQADQGVDFMTLHCGVTYKAAELGSQNNRVLGIVSRGGALLARWMFKNKKENPLYTEYDRLLKIASKYNVTISLGDGLRPGGGCDAGDSAQWEELMVLGELTRRGQQAGVQCMIEGPGHVRLHEVEAQVISIKKLTHGAPLYVLGPLVIDSSPGYDHISGAIGAAVSVRAGVDFLCYLTPAEHLSLPNKDDVYQGVMASRIAAQAGEVSLGRPLALEREACISESRKKLDWDGMRNAALDANAVDLRREPHKKEKVCSMCGDFCSMDMLNDKW

SEQ ID NO: 11183 - protein, 465 aa, Lawsonia intracellularis
MCGVFGITNHEEAARMAYFGLYSLQHRGQESAGIASYNGNNITSYVDMGLVPDVFSEDILSKELKGHYAIGHVRYSTTGISSRRNAQPISVRICDIELALAHNGNLTNAMQLRKQLENDGAIFQTNSDSEIFLHLIAHNLTNRSIEEAILYSCTQVKGAYSLVILVGNKLVGIRDPHGFRPLTLGKIEDSYALASESCAFDLLDITLIRDIKPGEMVIIDEGHVTSVPLLHSKNVPTRQCIFELIYFARPDSIVFGEDVYHCRKNMGIELSNECKTHADLVMPFPDSGVYAALGFSQASGIPYEQAYIRNHYVGRTFIQPSQNIRDFGVRIKLNPVRSMIANKRLCIIDDSIVRGTTVSTRVKKLRELKASEIHFRVSCPPLRFPCFYGINFSSKGELIAAKHPIEDLPNLLHLDTLYYLSLEGLLKSVSTSNNYCLACLNGEYPVPYEQKSVCSGCPKTKDSTK

SEQ ID NO: 11184 - protein, 1076 aa, Lawsonia intracellularis
MPKRSDIKKIMVIGSGPIIIGQACEFDYSGTQGIKALKEEGYNVVLVNSNPATIMTDPTLANHTYIEPLELETVTAIIRKERPCALLPTLGGQTALNIALNLAKSGILHECGTELIGASADVIEKAESREKFRQSMENIGLKVPSSAIAKTIEEVHQIALNIPFPVIVRPAFTLGGTGGGIAYNMEDLELIAIQGLTASPTNEVMIEQSVIGWKEFEMEVVRDAADNCIIICSIENLDPMGIHTGDSITVAPAQTLSDIEYQKMRNASIAIMREIGVKTGGSNIQFGVNPKNGELVVIEMNPRVSRSSALASKATGFPIAKIAAKLAVGYTLDELRNDITYKTSAAFEPAIDYCVVKIPRFTFEKFPGAKDELTTSMKSIGEVMAIGRTFKEAFQKGLRSLETGLPGFNSSNYTFTEEELPILLRNPNSLRIVAIHQALSSGMSLNHIHTLTHIDPWFLYQFKELIEMELILHNFALSNTITASNPELRPLLLKAKQFGFSDKQLAIAWERPESDIRNLRKELDIVPTYYLVDTCAAEFEAFTPYYYSTYESAKELSLEKKKKVIIIGGGPNRIGQGIEFDYCCCHAAYALKDSNIEAIMINSNPETVSTDYDTSDRLYFEPLTFEDVMNIIAQEQPDGVVVQFGGQTPLNLALPLVRAGVPILGTSPEAIDRAENRSRFQALLQKLKLQQPANGTATSINEAASIAKTIGYPIVVRPSYVLGGRAMQIIYEEKELIHYFSLYGKDCNLDRPILIDQFLEYAIEVDVDALSDGTNVYIAGVMEHIEEAGIHSGDSSCVIPPHSLSQELIEDIKSQTTALAKELQVIGLMNIQFAIKDNVIYILEVNPRASRTTPFVSKATGVPLPYLAMQVMLGVSLKELNPWAIEKTGYVSVKESVFPFHRFPGVDIVLGPEMKSTGEVMGIASTFEEAFLKGQQGVGQYLPSTGKVFFSVNDRDKPLLIDIAKQYLQLGFELIATSGTAVLLSKNNIPVQHVLKVYEGRPNIIDLIKNGDIALVINTPSGKQTTNDSRTIRQATLQYNIPYSTTLAGAKAIARAIQASRDTPIQVKSIQEYYNL

SEQ ID NO: 11185 - protein, 160 aa, Lawsonia intracellularis
MADQCKCPHCGNYIKEYKNPLPAVDIIIYSPDHGVIVISRKNEPLGFAFPGGFIEYGETVEHAAIRESYEETGLQIILQGVLGVYSKKDRDPRHHTLSVVFVACPLDIEKLKAGDDAASAKFFLLNDMPELVFDHKKIFEDFNCFLQGKRPLAPLVEPTE

SEQ ID NO: 11186 - protein, 283 aa, Lawsonia intracellularis
LSLDRSTEKNLWSRLLSFFHGRSNDSLEQAILEARDDGELDTEEGSMILSILKFDELQVQDVMIPRTDFDCMPSGSPVSEVASCIVETGHSRIPIYKDTRDNIVGIAYAKDLIELLLDPSKHHTPIDTTMREPFFVPETKPVRELLQEFRTRKNHLAIAIDEYGGTSGLLTIEDVLEEIVGDIEDEHDAPKEEDIHVIGDNCYELSGRAYLDDLLKLGINLEADEVDTIGGYLSLEAGHVPEQGETFEFDGWKFEVTEADAKQIRKVRVEKLLDEFSSKEENN

SEQ ID NO: 11187 - protein, 123 aa, Lawsonia intracellularis
MPTINQLIRHERKKVVKRKKTPALQGCPQRRGVCTRVYTTTPKKPNSALRKVARVRLTNGLEVTAYIPGEGHNLQEHSVVLIRGGRVKDLPGVRYHIIRGTLDTSGVQDRRQRRSKYGAKRPK

SEQ ID NO: 11188 - protein, 156 aa, Lawsonia intracellularis
MPRKGPVPRREVLPDPIYNSRLASRFVNRLMYDGKKGVAEKIFYGALENLSEKTGEEPLRAFERALDNVKPQFEVKARRVGGATYQVPMEVRSDRQISLSIRWLITYARSRGEKGMVNKLAAEFLDAFNNRGGAVKKKEDTHRMAEANKAFAHYRW

SEQ ID NO: 11189 - protein, 691 aa, Lawsonia intracellularis
VSRTVPIEKQRNIGIMAHIDAGKTTTTERILYYTGVSHKIGETHDGASTMDWMEQEQERGITITSAATTCFWDGYRINIIDTPGHVDFTIEVERSLRVLDGAVAVFDAVAGVEPQSETVWRQANRYGVPRVCFVNKMDRIGANFFRCVDMIQERLRAKPVCLQLPIGAEDNFEGIIDLIHGVSLKFDKETKGLEVERGPIPPELMELYQEKRLEMMEAAAEEDEVLLAKYLEGTELTAEEIIACIRKATIEQRLVPVLCGSAFRNIGVQPLLDAVVQYLPSPLDIPQMVGHNPNSPEEEIVCHCSDKEPLAGLVFKLASDPFIGHLSFFRIYSGFVESGMTVLNTTTEKRERIGRLLKMHANKREDIKWAGAGDIVALVGLKQASTGDTLCDEKRPVILESLDIPEPVIEVAIEPKTKTDRDALSTGLNKLAKEDPSFRVKGNEETGQTLIAGMGELHLEIIVDRLLREFNVNANVGKPQVAYRETITKPGKSDTKYAKQSGGRGQYGHCVIEIEPNPGNGYTFINSISGGVIPKEYIPAIDKGIQDALKSGILAGFPVVDIKVNLVFGSYHEVDSSEQAFYVAGSMAIKDAMHKSNPILLEPIMDVEVVTPDDYLGDVMGDLNGRRGKVQSMEARSGAQAIRAQVPLSEMFGYATELRSRTQGRATFSMQFDHYERVPAAIAEEVIKSRS

SEQ ID NO: 11190 - protein, 364 aa, Lawsonia intracellularis
MYKKFFNIYLNIITTHHLHFFLYFFLLTLLECITYTTSHAASIEPGIRLESLCIENNQTKLDLAIWYPTLQKPIQINYGDWNIIASHGAKPYPGKYPAIILSHDSAGSRFSLHELATTLTQKGYIVVSVTHQGDNADDMSLMFTIKQITGRVHQLNIIIDFLMNDQELFDILDTQKIGIIGIGTGGTAALLLGGAKLDPSAWWDYCNNIILPSSSIIVNDAYCSSWVKPKMNILAQQIDPQETYNNPRITAIVVVAPGFGMFFSKESLASLSRPILLVEATKDYINPPKYHSQYIEKQLSTYYEMIVLSEASTATLISPCSESLEQVLPEMCSKELDVTKQLIQKEIANTSAAFFTRCFSLFKK

SEQ ID NO: 11191 - protein, 622 aa, Lawsonia intracellularis
MRTTFDCIVVGGGHAGCEASMALARLGQKVLLITGNVDRIGHLSCNPAVGGIAKGHIVREIDALGGMMGLWADKAGIQFRTLNRSKGPAVRATRAQVDRDLYMQAVKQDIFSQPNLSVWQDTVEAIIVKDGHTGGVKTALGQLFNSQYVILTTGTFLSGLMHIGQKNFSGGRLGDVGTSKLSSSLHSIGLHLGRLKTGTTPRLLKTSIDFTSMEMQLGDTPIPSFSFHGPKPSQPQVPCYITWTNEYTHDVIRSGMDRSPMFTGVITGTGARYCPSIEDKVARFADRDRHQIFVEPEGLTSQECYINGISTSLPLDIQLALIATIPGLENAHMVRPGYAIEYDYVDPMQLHPTLETKVLPGLWLAGQINGTSGYEEAAGQGLWAALNVFCKITRQEPFILGRDNAYLAVLVDDLVTQGTKEPYRMFTSRAEYRLLLREANADIRLTPLGRKIGLVGDYQWNLFQKKISDIDTLVNRLQNIRIKPDTLDPSIFLELGESIPNRAYTLEELLKRPSITFQTLRKIYSDLPITSEDVYLETETIIKYAGYLDRQEELVQRSAKLEHSYLPKEIDYTKVAGLSSEVIEKLQIVRPQTLGQAGRISGVTPAAITCLEIYLKKIHAFR

SEQ ID NO: 11192 - protein, 173 aa, Lawsonia intracellularis
MLIKFFVFMKTKRSFQHYYLLVLLITYVNFLFGCSSKVIVGGGYSKKNTLLTQHIVKTAQSQIGTRYVLGGTTPRGFDCSGLVWWAYKKHGVCIPRLTEDQARAGIAIKFHAIKPGDIIIFKTCKGRSGLHSGLYTGCGRFIHSPRSGKHVRHDKIENLYWKSKLHTIRRIIQ

SEQ ID NO: 11193 - protein, 364 aa, Lawsonia intracellularis
MQVLLLDLGLELRGGQRQVYYLAQELQHSDVVPFIACPKASALAVVCKKERIPFIPLLGRSPANPLILFQLEKALRKLSINIIHTNDAHSAALGAFSKALHGNNILLMHSRRVSYPLHTGSRMKKYLLADSIVTVSEEIRKRVIQSGIEPNKVSTIHSCIDPSLYYPKKDRKDGRFVFQSIGALTSQKGYSNLLQAMHIIKKAKDLPPWEVRIAGSGELFQSLLNEAFELNVASQLALLGQQDSRVILPLADAVVVPSVEGEGSNATIKEGWATGIPVIASNLESNAELIQDEINGLLVPVNDPVALAMAMIRCMQEPRLCEKIVSEGTKSLENFTTTTMVKQYLQLYRNLFPMRTIPQQQKAS

SEQ ID NO: 11194 - protein, 108 aa, Lawsonia intracellularis
MCRILASFLACFMLIMVSYTLSDAKSDKFRTKGTVTSVNEEEQMFTIKNKHGETISFKVERKSDFEIERSIFDDKDVSFSELKVGDEVKVKAYKGEPPVADDVTIYRK

SEQ ID NO: 11195 - protein, 316 aa, Lawsonia intracellularis
MLPILATNAFVDHIQYQLCPGAEKLLEFYNHSSEDIYYGPNQMVIPIDAHLVHRGDGVFETLSIMEYHILQLKEHIKRIVTSSKKLKLSLPCSTSKLKKLIMTVAKAVNKNEGNIRVLIGRGLGGFSISSLEYPNSSLYIVVYNTTQLLESWYKNGLTACKSNILSNPILFLTNIKTVSYILGILMELEAIEQKVNLTLSFNEQWCFTKSAIANIAIVSQDNTLIFLEFQNILIETILEKTIEALKPSVLIELQCITEQELLTAKKILVLGTTHLCIGITKYNGHIIGNGTTGPISNMLRNMLKKTLLKHGIPINH

SEQ ID NO: 11196 - protein, 347 aa, Lawsonia intracellularis
VSKKPVIAIVGATGAVGRECIKLFEERNFPLNDIKLFASSQSVGIKIPFNSDELSVQEITDQSLQDVDIAIFSAGSEVSKKYAPIAVSSGCVVIDNSSHWRMDDRCPLVIPEVNAHTLDNHRGIIANPNCSTIQLIVVLAPLHNIGKIKRIIVSTYQSVSGTGQKGINEIEKQTLQIFNLQQPEVTIYPHRIAFNCIPHIDSFLDNDYTKEEMKITNETKKIFDDPAIKVTATCVRVPVFYGHSESVNIEMENKITPQQARAILSQAPGVCVYDNPKENMYPTPLDATGEDLTFVGRIREDHSIDNGLNLWIVADNVRKGAALNAIQIAEHLVNNDLLTIDNPNLFL

SEQ ID NO: 11197 - protein, 194 aa, Lawsonia intracellularis
MSKRAILKKQQYILLIIIVGALSIICGTTSYFIEHPTLTMHIEQQEASAIQQDKNITNASQTDLLTLTQKLQANPNDARILLELSKYFIELCEWKQAEYFLLHALIVEPNNPDILYLLGITQYNQEEYIDAVNSFKKVLIIEPDPSAQYSLGLLYLYYLDEKNQGLQYLQQVIDNPKSTPEMKQTTQQLLANHK

SEQ ID NO: 11198 - protein, 227 aa, Lawsonia intracellularis
MKPLWLYTLVSLSGLGMAFCQYLIYCYAPIESELGIIQKIFYLHLPLAWWALISFFIVCIASIGYLKTRKTYWDALSGATAEIGVILSSATIITGSIWGKQSWGVWWTWDPRLTTALVLWFLYSAYLVLRQLDIPQERRSLLCSVLGIIAFLDVPLVFLSARIWRSIHPTVFASNNGGLDSEMKLTLIACIICFGFFWLCIISIRGKQYIQKERLAALTSTQIWKGK

SEQ ID NO: 11199 - protein, 225 aa, Lawsonia intracellularis
MFTHAIIIAQKDIKLLFSRGIGVIQALLLGLLLIFIFSLSKPLDENITAQAAATIFWLASIFCQVLTFNILYHIEKKSDTWSGLLLTPCPVQAIWLGKALTGFIIISVAQLIFIPAIVVFLNQEPGICWAQSLLIIFLINIGLVSIGSLIGGLSQGQSTQESLISIILFPLVVPLLLAGIHTCTDALSSESTEAMYSWMHIVIAFDAIFAASALALFPVISLGDE

SEQ ID NO: 11200 - protein, 211 aa, Lawsonia intracellularis
MLLQLIAISKVYSNRPILKNISLNITSNTITYLTGENGAGKSTLLKIMAGLLKPTSGEIIFNCSLEEIGYLGHTPFIYQDLSAYENLLFWGRLYKKRLDKKQIATAIEQMKLTRFIYERTRTFSRGMLQRLNFARVLMLKPKLLLLDEPESGLDNQSLSICYNEIINAKTAGAGIVWISHNLIKNEKVDQHIILKNKKIEYTKKEPYAFQQ

SEQ ID NO: 11201 - protein, 668 aa, Lawsonia intracellularis
MTIALIDIFWIANTLWPWHKLNKFILIIKNKYPNQSSKKVSLTLAEITSISITILLSIASGILTYALASYNFSLQYVASYTDQFLPLFYRITAFWAGQAGSMLFWALSTSIASCIFQHTYLYKKLSIDTKLWFWILYLSIMAFFGLLLITWNNPFILLDIKPIDGNGLNPLLQNPGMIFHPPLLFLGYGWFTIPGCLALAQTISNQKEEPSWIVISKPFILSAWAFLTAGIVLGGWWAYMELGWGGYWAWDPVENASLIPWLISTAALHTIIIQTHKNVLTHINVFLMALTTLSTFFATYLVRSGIVQSVHAFGTSNVGKPLLIFITFATITIISIFYTAYSTKDNSELSTINSRIGFLIFTSWLLLALAILILLATMWPVFTSFWNQIILGQSILQSSTSINQESAGSIGLTSDFYNKTCLPLFAILMALLSLCPWLGWTRGIHNLKNITLVLITFFTSSCIMYLSGYQLPIAILGASSAFAIMTSTVLLVLDKQTRSNKPMLLAYGIHFGVALIAMGIAFSGPYKIEIEQILHEGETIKVGNFDIKLIKIQEGELVDYAYIEGLLEVRKDGKFIDFIAPQRRIYKKWGKMQFAEADTIPSLGNELYASLLAVDHQNRALFRLSSMPLVNWIWIGGAIISLLPFFSIISSYRGKNYASSANSYQQSI

SEQ ID NO: 11202 - protein, 138 aa, Lawsonia intracellularis
MDKKTSNTTYVYIIALLLFIVGIGYLAFIGFYENSVYFLNVKEAIAMPSEKLKSARLFGIVIAEHYTQQHGKTISFQLRDKEYPSNVISVEYTGVIPDTFRTGAEAIVEGSLTPEGIFQAKTLMTKCPSKYEKEEKKS

SEQ ID NO: 11203 - protein, 348 aa, Lawsonia intracellularis; identical to SEQ ID NO: 8740

SEQ ID NO: 11204 - protein, 105 aa, Lawsonia intracellularis
MTTVSSDRIRIKLKAYDYRILDKAVAEIVDTARNTGASIAGPIPLPTNIHKFTVNRSVHVDKKSREQFEMRIHKRLMDILEPTQQTVDALGKLSLPAGVDVEIKL

SEQ ID NO: 11205 - protein, 210 aa, Lawsonia intracellularis
MSEKIGILGQKLGMTQVFGGNGFAVPVTVVQAGPCPIVQIKTVEKEGYNALQIAFGEGKKKHVSKSMQGHFSKAGLSLYRKIQEVRLKGSLTSYEVGQVLTVGLFSVGDKVKITGKSIGKGFQGAMRRWNFAGSKDSHGCEKVHRAAGSIGNNTFPGHVFKGKKMAGHWGTEKVTVQNLVVVDIRPEDNIILIHGSVPGPKNSFLFISMQ

SEQ ID NO: 11206 - protein, 206 aa, Lawsonia intracellularis
MAIVTVYNQQKEETGKINLSSKIFEVQVQPEILHLVVRAQLAAKRAGTHSVKTRGHVSGGGAKPWRQKGTGRARAGSNRSPLWRGGGIVFGPQPRDYSFKVNKKIRSLALCMALSSRFAEENLIVIDNIVLPEIKTKHFVGVANILGLHKALIVAPVESTQLLLSMRNVPNVKLLTYDRLNVYDILKYKQLVLLEGAVQHIEARLK

SEQ ID NO: 11207 - protein, 95 aa, Lawsonia intracellularis
MHPTQIILRPVITEKVTILRDSVKKVAFFVHPQSNKIEVKKAIELLFNVKVMAINVVNYTPRVRTRNRRKVHVSGCRKAYVTLAPGEKISFFEGL

SEQ ID NO: 11208 - protein, 276 aa, Lawsonia intracellularis
MAIRNLKPTSPGCRFQTISDFKEITCSSPEKSLTYGLCKKAGRNNHGHITSRRRGGGAKRLYRLIDFKRDKVGVPAKVAQIEYDPNRTARIALLHYVDGEKRYILAPVGIKQGDIIETGVDADIKPGNSLPMLHIPIGTLIHNIELNPGRGGQLCRSAGAYAQLVAREGKYALLRMPSGEVRKVLASGAATVGQVGNIHHENISLGKAGRNRWLGRRPKVRGVAMNPVDHPLGGGEGRSSGGRHPVSPWGMPTKGYKTRDKKKPSSRLIVKRRGQK

SEQ ID NO: 11209 - protein, 93 aa, Lawsonia intracellularis
MPRSLKKGPFVDKDLMKKVDAAIANNDRRVLKTWSRRSTILPEMVGLTFAVHNGKKFLPVFITENMVGHKLGEFSPTRTFYGHAGDKKTKAKK

SEQ ID NO: 11210 - protein, 112 aa, Lawsonia intracellularis
MESKACAKFIRVSPRKARLIASNVKGKTVELAMNILKFTPNKSAGIILGVMRSALANAEHNAKLDVDTLIVKEVIVNEGPTWKRFMPRAQGRATHIRKRSSHISVVLSEGQE

SEQ ID NO: 11211 - protein, 213 aa, Lawsonia intracellularis
MGQKVHPYGFRLGYNKNWQSRWFSKKDYANFIYEDYKIRSYIKKLLYSAGISKMEIERAGGKICLMLSTARPGIVIGRKGVEIEKLRLELRKNFGQEFSLEVTEVRRPEVDAQLVAENIAMQLERRVAFRRAMKRTVSMARKFGAEGIKITCSGRLAGAEIARTEWYRDGRVPLQTLRADIDYGFAEAHTTYGIIGVKVWIYKGEVLDKEVEK

SEQ ID NO: 11212 - protein, 137 aa, Lawsonia intracellularis
MLAPKKVKFRKWQKGRLRGPALRGISIAYGDIALKSTEHGKLTSQQIEAARIAMMRHIKRGGKVWIRVFPDHPITAKPLETRQGSGKGSPVGWCAPVKPGRILYEIKGVNIDLAREALIRAAHKLPVKTVIVLKERL

SEQ ID NO: 11213 - protein, 88 aa, Lawsonia intracellularis
MPQIIAKCNGRVLVGTVISDKNDKTIIVHVETLVKHPLLKKFIRHRKKFTAHDPLNECSIGDTVKIIEFRPLSRNKRWHLVAILEKAV

SEQ ID NO: 11214 - protein, 122 aa, Lawsonia intracellularis
MIQVESTLQVADNSGAKKVACIKVLGGSKRRYATVGDIIVVSVKEAIPHSKVKKGEVLQAVIVRTKKEVRRMDGSYIKFDSNAAVLLSKQGEPVGTRIFGPVARELRARNFMKIISLAPEVL

SEQ ID NO: 11215 - protein, 106 aa, Lawsonia intracellularis
MQQIRIHKNDKVMVIAGKDKGKIGKVLKVCHKHNRILVEKVNIVKRHVKPNPYRREHGGIIEKELPIVTSNLMIICSSCTSPTRVHYRYSESGKKLRICKKCNESL

SEQ ID NO: 11216 - protein, 179 aa, Lawsonia intracellularis
MTRLEKFYQEKVVPALQKEFLYKSIMQVPTIEKISLNIGLGVASQSNKIMEEAISELSLIAGQKAVITRAKKSIASFKLREGMPIGCRVTLRKERMWDFLDKLMNFALPRVRDFRGVSENGFDGHGNFTLGIKEHSIFPELEIDRIENTKGMNITIVTSAVLDSEGKVLLDLLGMPFKK

SEQ ID NO: 11217 - protein, 126 aa, Lawsonia intracellularis
MMTDPISDMLTRIRNAQLALHKDVAIPYSKIKYSIANILKEEGYINELTLNNGTITLYFKYYKGKAAIEGLRRISKSGRRVYVSTHDIPSVQNGLGICILSTSIGVIGCNKARCSKVGGELLCEVW

SEQ ID NO: 11218 - protein, 181 aa, Lawsonia intracellularis
MSRIGKLPIMIPAGVEITFGEKNISIKGPKATLVTPKCELLSYEHKEDKIILTCNFDTRESLAQYGLRRTLLANCIEGVTKGFSKTLEVIGVGYRVSVKGNIVELSVGYSHPVHIELPDGITAKAEGQKLTIMGSDKVLVGEMAARIRRIRKPEPYKGKGIKYESEIIRRKAGKSGGKGKK

SEQ ID NO: 11219 - protein, 120 aa, Lawsonia intracellularis
MSIKSKNKLRQHRKIRIRKKIFGTADQPRLVIFRSNLHIYAQLVDDITGSTLLTTSTLSLKDNGINIRANKSGSTLVGKEIARLAIEKQIIKIVFDRNGYLYHGRVKAVADGAREGGLKF

SEQ ID NO: 11220 - protein, 163 aa, Lawsonia intracellularis
MEQSELGFIEKVVSLNRVAKVVKGGRRFSFSALVVVGDGKGSVGFGLGKAQEVPEALRKATEQARKAMMKIPLIEGTLPYEILGEFGAGSVMLKPASRGTGIIAGGAVRAIMEAAGVTDVLAKAIGTNNPHNVLRATMAGLSALRSAQLVSNIRGKLLEAPRK

SEQ ID NO: 11221 - protein, 149 aa, Lawsonia intracellularis
MNLTTLYPFLEERKLRKRVGRGSASGLGCTSGKGNKGQNARSGGGVRPGFEGGQMPLQRRLPKHGFKNAFFKVEYAIFNLDWLTTFFKGKNEILLEDIYSHKLCSVGTPVKILGSGSISNIVTIEAHKFSRSALKKLHEVGGQAKIIEK

SEQ ID NO: 11222 - protein, 435 aa, Lawsonia intracellularis
MAVSTTTLNAAPELKIKLLWTVGLLCAYRIGVHIPVPGVDGIALTHFFESVAGTLFGLFDMFSGGGLRNVSVFALGIMPYISASIIMQLLQVIIPDFKRMAKEEGAAGRYKITQYTRYGTVIITLIQGIGIAIGLESMYSPTNIPIVLEPGWVFRIVTVLTLTAGTVLIMWLGEQISEKGIGNGISLIIFSGIVVGIPGAIVKTYQLIILGDMNILIALVLMLFMFAVLTGVVFMERAQRRIPIQYAKRQLGRKVYGGQSTHLPLRVNTAGVIPPIFASSLLLFPATMASFDISDWLKDIAVWFSPSTILYNCIFLVLIFFFCYFYTAIIFDSKDISENLKKAGGFIPGIRPGEKTCEYLDGVLSRLTLWGGVYISIISILPMMLISQFNVPFYFGGTSILILVGVAMDFMSQIESHFISKQYEGLMNKKTKGRG

SEQ ID NO: 11223 - protein, 256 aa, Lawsonia intracellularis
VKKYRGTFLKNEREIGILKEANRMVATILEELEKQVRPGLSTLYFEDIVQQMCREFKVKPAFQGYYGYPYALCCSVNEAVVHGVPSEKKILQEGDIVSFDVGVLYQGFYGDAARTVPVGTISSEASQLIQITRESLELGVLETRAGNHLYDISSAIQHHVESAGFHIVKRFVGHGIGIGLHEKPEVPNFVPTVGLGIPLKVGMVLAIEPMVTIGSPEVEILEDKWTAITCDRSLAAHFEHSVAILPSGPCVLDSLV

SEQ ID NO: 11224 - protein, 122 aa, Lawsonia intracellularis
VARIAGIDLPRGKRSDIALSYIYGVGRVTALKVLDAVGINWSRSIDDLSAEELNEVRKELEKNYKVEGELRREVSANIKRLMDIGCYRGLRHRKGLPVHGQRTHTNARTRKGPRKGAVGKKK

SEQ ID NO: 11225 - protein, 129 aa, Lawsonia intracellularis
MAKPKRIGKKREKKNIPVGVVHIQASFNNTIITFTDPRGNTISWASSGQSGFKGSRKSTPFAAQVAAEQAARRAQDNGMRTVGIYVKGPGSGRESAMRAINAVGFKVAFIRDITPIPHNGCRPPKRRRV

SEQ ID NO: 11226 - protein, 208 aa, Lawsonia intracellularis
LAKYNDAKCRLCRREGTKLFLKGDRCFTDKCAYDRRPYAPGQHGRVRKKMSDYAIQLREKQKVRRVYGVLEKQFREYFVHADMAKGITGVNLLSYLERRLDNVVYRLGLANSRVQARQLIRHGIFTLNGHKVTIPSLQVNVGDSIEVPEKNRKISVVADAQSIVGRRGCPSWLELDASTFKGVVKALPQREDIQFPINEHLIVELYSK

SEQ ID NO: 11227 - protein, 347 aa, Lawsonia intracellularis
MLFREGTRLINSRNWAKLVRPEAVINNMESNTTTYGRFEYEPLERGYGITIGNALRRVLLSSLQGAAFVSVKILGVQHEFTTIPGILEDVTDIILNLKQVRLAMDTDEPQHLSLFVSKKGIVTAADIQTNQHVEVLNPEQHIATLTEDIELRMEFEVRMGKGYVPAEMHEDLHEEIGLIKLDSSFSPIRNVTYVVEQARVGQMTNYDKLVLEVWTDGSVSPEDAIAYSAKIIKDQISVFINFDERISGSGGNEGSGSSDLNDNLFKGIDELELSVRATNCLRSANISTVGELVQKAEADMLKTKNFGKKSLDEIKALLTSMGLDFGMKIDGFEKKYQEWKRKQHHEA

SEQ ID NO: 11228 - protein, 126 aa, Lawsonia intracellularis
MRHKNSGKKLNRTPSHRKALFRNMANELIKHGKICTTETKAKELRRIVEPLITLALRNDLHSRRLAFQSMGDHQLVKHLFNNVAPAFVNVPGGYTRITRLALRRKGDCAPMAMIEFTCQKIDEKSI

SEQ ID NO: 11229 - protein, 471 aa, Lawsonia intracellularis
MNNIYPIILCGGSGTRLWPLSREYYPKQFINFGSGTLFENTLSCIASLRNVQNPIVVCNEEHRFFVSKLLQQQNRVATIILEPEGKNTAPAIALGVSAVSELESDPLILVLPSDHLIGSNSIFHSAVMSGISVAIEGHFVTFGVNPTGPESGFGYLQYGQEVSDGIFKILNFTEKPSKARAKEFLALGNYAWNSGIFLFRASTYLNELELLAPQIFSACKQGWDERTQDPLGFFRPNSQKFLQSPSGSIDYVIMEKTEKLYMVKLETNWSDLGSWESFYNAEVHDSMGNVVSGDVIAQDTENCYLNSTQRLVCALGVKNIIVVETADAVLVVDRNQTQNVKNLLEQLRISGRTESETHMRVFRPWGSYETLFSSTGYKVKKITVSPGATLSLQLHQYRAEHWIVVYGIANVTINKAEHIVKVNQSIYIPVGVEHRLANYGEEPLEVIEVQSGSYVGEDDIIRLEDVYGRTE

SEQ ID NO: 11230 - protein, 433 aa, Lawsonia intracellularis
MIDETEKPNVVALFPLVIFLTLFIGTGIFLTFMGTEMAFYQLSATVAILPAICISVLQGKSNLSKNITIFLYGMGEINIVTMCLIYLLAGAFASVTTSIGCVSATVNFGLSLLSPSMILPGLFLTGAFISTAMGTSMGTIAAIAPIAVGVGQQTDISLSLLMGVVIGGAMFGDNLSFISDTTIAATRSQNCEMKDKFRMNFLIALPAALITIFLLWASGTSSYVVHNESYEFIKVLPYLVIITLAMIGMNVFVVLAVGILFSGILGLSTTNYSFLIWAQDIYKGFLGMNEIFVLSMLIGGLGELIRYHGGIAWLLKMVDTLVTHLSKRKSPKVGEWCIGLLVTLANLCVANNTVAIILTGKMSKEIADKHGISCRKSASLLDIFSCVIQGLIPYGAQLLLAGSISQVSPFSIAIENWYCMALFLAACISIWID

SEQ ID NO: 11231 - protein, 419 aa, Lawsonia intracellularis
MNNIITAIKGFSDLFQPESNMFSYIEHTARAIFSLYNYEELRIPLLERTELFCRSIGLETDIVQKEMYTFLDRKNRSLTLRPEATASIIRAYIENKKYTQEAVSKFLSIGPMFRYERPQKGRMRQFHQVNCECLGVTDSYIDAEIIIMLMQFLTALEIKDIRLEINSLGCADCRPLYKDILQKWLDQLDTQTLCDDCQRRKETNPLRVLDCKVSFCKEKTSQAPHFLDYQCKTCLDQFSTVTTLLSLENIPYIINHRLVRGLDYYMRTTFEVISSNIGSQGAIAGGGRYNGLVAQLGGPDIPGIGFACGMERLALLLPRKDLPRPDFMIGVFIAEGKDKAFSISSQLHKAGFSGEMLFNLGSMKSLMRHANKARVRYCLLLGTEELALNSISIKNMDTGVQEKISLDKVSSYFITKLSK

SEQ ID NO: 11232 - protein, 599 aa, Lawsonia intracellularis
MSESKKEVIICQSCDGWKRSHTCGELSIKDIGKHVILMGWVQSRRDHGGLIFVDLRDRFGITQVVFSPDSSLEAHSTAHIIRPEYVIAVDGIVRMRPEGMINPNLETGQIEILVSSWKLLNISKTPPFQIEDNIETGETLRLQWRYLDLRRPVMKKNIILRSNAMQIIRNYLSSHGFLEIETPFLTKSTPEGARDFLVPSRLYHGKLFALPQSPQIFKQLCMVAGLDRYFQITRCFRDEDLRADRQPEFTQIDIEMSFVNEEQVMECAEHLMQTLFQEALSTEISLPFPRITWFEAMKQYGVDKPDIRFGLELHDVTSIVHMSEFKLFSHAKLVKAIRVPGGASLSRKEIDDFTEFVKNYGAQGLAWIKINEEEWQSPIAKFLSEKEKEELSIELNVSKGDILFFQAGSPEVVNAALGNLRVQLGNYLGLIPQNTWSFVWVTDFPLYEYSEEERRYVSCHHPFTAPKESDIHFMKTNPAEVKARAYDLVLNGNEVGGGSIRIHQAEIQRHLFEDLGFSLEDIQQQFGFFIEALEYGAPPHGGIAFGLDRLVMLMSNSESIRDVIAFPKTQKGACPLTGAPDFVSSKQLRELGLTLRNKN

SEQ ID NO: 11233 - protein, 330 aa, Lawsonia intracellularis
MNQNSYTKPLIECNSLTKHFAIRHGVWQRIQGYVHAVEEVSLTVYQGETFGLVGESGCGKSTLSRMIVGLLHPSSGELFFNGQSIFDSVNKKALRHKLQMIFQDPFSSLNPRLPIGISIAEPLTVLKVSAKKKLESILEILEFVGLQPEQKDRYPHEFSGGQRQRIAIARALIAHPELLVCDEAVSALDASVQAQVLNLLKDLQAHFGLTYIFISHDLAVVGYMSDRVAVMYLGRIVELAPTKSLFERPAHPYTQILLDSIPIPDPFSRKTYRLLKGELPSSLSPPSGCPFHLQCPKVMPICRKELPQLTVLKQTELVEKNRFVRCFLYT

SEQ ID NO: 11234 - protein, 254 aa, Lawsonia intracellularis
MSQISPLYYGIIPARYGSSRLPGKPLIDIWGKPMFWYVYQNAVESNIFRSVVLATDSEEIAESAHQLSIPYVMTSVEHISGTDRVYEAAIKMNIEPDSVVVNIQGDEPLVKPEAIQQLVEPFIDVSIQVTTLSTRITANQAMLPHQVKVVVSSNGDALYFSRAAIPYLRDNDTDGYYLGHIGLYAFRMHTLDKFVHLPPSQLEQFEKLEQLRLLENNIPIRVVNTNHTSQGVDTVEDLEIVQGLLAQRMEAVSR

SEQ ID NO: 11235 - protein, 376 aa, Lawsonia intracellularis
MKALLALEDGFILEGQSINGHCESSGEVIFNTGMTGYQEILTDPSYYGQMVCMTWPLIGNYGINKEDMESEKIHVSALIVKECCRNPSNWRSETSLPKFLQEYNIAGIEGIDTRALTRHIRINGAMRGIISTSITDPNDLILRVKKVPSMEGQNYVTKVAPNSPWVLYGQCVVPADIKEDGSFLWKQNKIPLIVYDYGIKWNIIRLLEGAGFDPLMVPPLFSLEQVKASGAKAIFLSNGPGDPGTLIDEIQIIRELMEYYPIAGICLGHQLLGHAVGGTTRKLTFGHHGSNHPIKNLATGHIEISSQNHGFCVNFESNNDIEVTHINLNDNTLEGFIHKTKPILAVQHHPEASPGPMDSQYFFTRFKEVVLLKLGC

SEQ ID NO: 11236 - protein, 275 aa, Lawsonia intracellularis
MSNELTRVRQQLSQIRTQLRKDKILPAIQALHHAITVIIKTPLLKAEKEEFEHMLHDALGSIMEHPKVREIFPLTIIYTKGQERQLLSDVYELLTVVDSTIQDAAKEALKDFETRRERLFNEGQKQLEKGNILEAREAFSKLAKEFKDDPELMGQIGKMYLKYEYYEDAIIYLETALTINPELAYLYNYIGIALRKVGKFDIAEKYYLRASKYLGKDPNLFFNLGRLYIDWGDWEKAIVSASAALKVRPDFMEAKKLRKYAERMKHKNSSVLFEE

SEQ ID NO: 11237 - protein, 219 aa, Lawsonia intracellularis
MKKKHALYEENYFHLFNNRVVTPSYSLGLPFFNPPIPDSTLFNPLAYLFGSIYYLYKGIWRKALILLALNIPAMFQPLPIIQPLTTPLEIISSICLVIGCFILCMMIFLQYTEVIIGLIILLLPIFIYYCFLSTNQHISIIATISFWSTLTSLFIFFLLRKKSNQLVLILLIGIIGWMVGVSPQTLLWSFFTVLPYTLAGIMGKYDVYRSKVLHETFYW

SEQ ID NO: 11238 - protein, 393 aa, Lawsonia intracellularis
VFLFIGVPMHGLFLLKGLIILWGIGAGLISCSSNEQASMPAPLVEVMTIESKDTPIVLTFVGQTEGSRSVEVRAQVSGILMNRAYEEGQYVEKGQLLFEIEPDTYKANLEQAQSMMEQAKAKFVQAQQERDRILPLYKKNAVSQKDRDSAVASYNAAKADLDAAKAEVTEAKIKLGYAYVKSPVSGYASKENKTIGNLITAGSSSDSLLTVVNQVNPIYANFSIPSPQYMHIKMLKSENLLTIDNPTATMTLADGSIYKETGKVTFIDKQVNPSTSVVAARAEFINPDAHVLPGQFVRVNVQGVILVNAILIPQKALIQTQKGTVVAVVNKENKVEMRPVRIGQNYGENFFVYSGLSNGDRVIVEGNNKAIPGQPVRLKESIQPAMNEAGGKK

SEQ ID NO: 11239 - protein, 1049 aa, Lawsonia intracellularis
MSNKENITEVKEGFFLRRPIFSTVISLFITFIGILAIFSLPIEQYPNLTPPQVEIKTTYNGASANTVSESVASVLEEQVNGVDNMSYMNSVSAGTGTMTLTVTFDVGTDPEEATINVNNRVQLATPKLPQDVQRTGISVLKKSPAILQIVFLTSPDERYDTIFLSNYALLNIVDDLKRVPGVGDVQNFAGQDYAIRVWLKPDRMEQLKITPNDVINAINDQNIQIGAGRIGDEPVSSSIGVTWQIITKGRLETPEQFENIILRTEPDGSILRLKDIARIELGAQVYNFTGRQDGLAAIPIGIFLAPGANALTTAEAVRVKMKELSTQFPVGVAYDIPYDTTTFVNIAIKEVVKTLCEAMFLVFLVVYLFLQNWRATLIPCLAVPVSIVGTFAGMHLLGFSINTLTMFGLVLAIGIVVDDAIVVLENVERHISEGQPVHIATAKAMSEVTSAIIAIVLVLCAVFIPVAFIGGLAGRMYQQFAITIAVSVVISGVVALTFTPALCIVLLRNYEPTTSSFFKNFNDWFANITGKYIHIVKVLLRRTLLTICLFCLVLLGTTALIKIVPSGLVPDEDQGYFISLVMLPDGASLSRTSKTASILEQQLIKDSSVEHVMSFSGLDAISGASKTNAATIFVTLKPWGERKKKDESSFAIVRKVFGLGSEIPEGYVVAFNPPPISGMSNTGGFELWVQNRIGASEVELYTMIQKVLQKARGRKELQGLNSSFGVNAPQLFIELDREQAETLGVSISDVFSAMQSTFGSYYVNDFNLYGRTFRVYTQSESDYRALPENIKEVYVRNRNGEMVPIISLLKVKPIAGSQIIERFNGFPAAKIMGSPASGYSSGQAMDAIESVAKEVLPEGYTLAWSGSSYQERVVSGGGSFVLLLSLIMVFLILAAQYESWSLPLTILTAVPFAAFGAILAIWLRGIANDVYFQVALITLVGLSAKNAILIVEFAVEKYRLDGMNIIDAIEEASRLRFRPIIMTSLAFILGCVPLAISTGAGAASRHAIGTSVIGGMLLATIIAPLFIPFFFRWIMVISEKFSSKKSTQE

SEQ ID NO: 11240 - protein, 459 aa, Lawsonia intracellularis
MKRLLLCIITCVIVSSCSFAPDYNRPHLELPEVWVSSPETGVPASMQWWKRFNDSTLDILVAEALQHNRDLIAAVARVDYAQAQLGVARSDLFPHFSGNAQATPVWVDHKRVTDGQSPYSANFSASWEIDIWGKIRNAKDAAFSQLMATEAEKEGVFLSIAAQTANAYFLLRSLDLQCSIAERTVKTREDALSIYTAQYQKGFINKLDLTRAKTEVETARTALYQKRIAQENAETALSVLLGRSPRLIMDTAIERGVSMKDLSCIPVIPQGIPSELLERRPDIRQAEYTLKATSANIGVARAAWLPSISLTGLFGIVSPHLSDLLKNPLKTWSYGETGTVPILDFGQVYYNVEAAQAKEREALANYEKTVQNAFKDIHDALIRQYESKNIVNSLERMVKELRIAVHLARTLYDNGYTSYLDVLDAERALFQSELDLASAWSDRLSSIVQVCLALGGSWE

SEQ ID NO: 11241 - protein, 141 aa, Lawsonia intracellularis
MPIYEYYCTQCDNTFEEWSKNASSHEHKKCPNCGGDAKQLISNTAFILKGSGWYVTEYGNKKSEEQNKKNTSDKTEVSSDSSSTTLESSGDGSSSTETHKTPSISEPQKTSKEKPKVQQNTKSAVTASSEVTSSNEATISK

SEQ ID NO: 11242 - protein, 443 aa, Lawsonia intracellularis
MIDRYTRKEMGRIWTLNNRYQTWLRVELAVCLAWNKLGVISDDAFKTIQERAVIDVNRILEIESITHHDVIAFLTALEEQIGPEARFIHLGCTSSDIVDTATSLLLIEAGELILKGFDKLLTSIESLALKHQGLLCMGRTHGVHAEPTTFALKFANFFAEIQRDKERFVQAFNGIHVGKFSGAVGTYTFLTPEVETIACDILGLKPDTISTQVIQRDRHAEYFTALAITAGSIERLCVELRHLQRTEVREVEEGFQKGQKGSSAMPHKKNPISAENMTGLSRLIRGNVLAALENQALWHERDISHSSVERVIMPDTTILMDYIFHRLSGILDELIVLPENIECNMQASFGLFYSQRILNALIESGMGRQEAYVSVQRNAMQSWETKQPFQEVIMDDTNIVSCLGQEMLEKLFDTSFYLRYEKVILGRIFGESTLQKYQANKKN

SEQ ID NO: 11243 - protein, 187 aa, Lawsonia intracellularis
MDILKKRLAKIFFERSYKEGNFTLSSGRKSDYYFDCRQTALHPEGAWLIGNLLNALLVDVDISAVGGMTLGADPLISAITVISYELDRPLSGLIVRKEAKLHGTAQYVEGLANVHSGDRVAVIEDVVTTGNSLLLACERIKASGLTIAILCTIFDREEGGKEFLQEAGYELRSLFTRKELVDLATSL

SEQ ID NO: 11244 - protein, 301 aa, Lawsonia intracellularis
LEDAFFFTIGIHLTTFNTFISIKDIFQVNKIAIAEMHSSMIPGRRDNVSLRKPRNQEGTSYISQLKNRTVQWNDAWVKRSLTFFDFYWPEAYTVFQGIPFQEYKDKEVNSFKVNQWVDSFCGEIHVEKEAEYWVSWFHQYLRMPNSSIEGIRKLYWKENEQGELKIVGMKWIPQELDLESSYLESITSKITAFIEDWRFAWETGDVEKYAVYYAEDSIQGDRRGKDAIIEHKRSTWNTRKPKEVFLTGLRVMAVKDGIQVDMAQRFHDALAYSDKGIKTLLLRPTGKSWVIVREDWSEILQ

SEQ ID NO: 11245 - protein, 311 aa, Lawsonia intracellularis
MNTKSSMLSLILMHDDGEARSIRISKRGLWLLVILTILAPIAGLIGLWVGWEAWESMSNWQQEKLAYQTQIDELRVQLERFATLEALLKRQDAALGSKVDNPQLQKERQVNTSEKKDVKKTIEENEGVAKNSSSMGTIMPPKAIPQSSIVPTSTGSGVKEISHAFESHSSDKQNYEGNIHTTSIQPSVVTGKSAHTTGEQSSFIDYGVVKVENVQKQIIQGKRIQAQISLFNTEKVPQLSGHVQFALITNDGKKYALSGSDTSFRITRFKSMFIDSELPVSDAIAQKSKLLIEVVSGDKVVFRQLYPLSEK

SEQ ID NO: 11246 - protein, 158 aa, Lawsonia intracellularis
MSKESLWKSPWFKYLLGGFILGIIVIVGINWGMKVTDSRPFCASCHIMEQAAVTNKLSIHANLSCNDCHAPHELWRKIPFKAKEGIRDFYMNTIGNAQLPIIPGTETKEVVNENCKACHAISNMTVSSTEAKPYCVDCHRDMKHMHMQPISKRIVADD

SEQ ID NO: 11247 - protein, 517 aa, Lawsonia intracellularis
MINQIILKSVYGLLLCLVVVLSGCGDVDTELKTPEYNTGLPADHLGNLAFKKIFPLHYASYELNNESSIMTVYKGSVPYMKNDNKDPLPEGYKYAQPYLKNLWLGYPFMYDYRESRGHTHAIGDVLDSDRPNRYAFKSGLPATCWNCKTPQMLKWTKDDGNAFWSKDMNEFRERLHPEDDTVGCVNCHNPQTMELQLYSEPLKDYLVSVGKDPDKLSRQEMRSLVCAQCHVEYYFEKTGVPAKPVFPWAKGFNPEDMYQYYKEHGDSTIPGFEGQFYDWIHPVSKTPMIKIQHPEYETWIDGPHGSAGVTCADCHMPYIRGENGQKMSSHYWTSPLKDPEMRACRQCHADKSPEFLKESVVSVQKATFDQLLIAQELSVKAHEAVRLADEYTGPRANNYDQLMIQARDMIRKGQLFWDYVSAENGVGFHNPVKALNTLASSIQYSQEAINLAMEATKYAIGPNLQGDIKEIVPPILVMSRKLQQDPEYLKTNPWFKYLKVLPKAEIEWDGTKYLGDK

SEQ ID NO: 11248 - protein, 410 aa, Lawsonia intracellularis
MQILVQKFGGTSVATLECLKQVQQKVTNALNNGFKVVVVLSAKAGKTNTLLELAHSCAENPDPLELDSLLSTGEHASITLFSLLLNKQGIKTRSLLGWQIPILTNNDFGQARIISINGDMLYKQLKNYDALIIAGFQGVTQEGQITTLGRGGSDTSAVAIAASLGSCKCEIYTDVEGVYTTDPNLCTKARKLAYVSYDEMLEMASMGAKVLQIRSVEFAKKYNVPIKVLSTFSNASGTMVTQENSIMEAVLVSSIAYDNDQARVTLCDIPHHIGTAASIFGPLAEQHILVDMIIQASSRNNLTDITFTVSRKDLTRACNLMEELIKSIGGKSVECATNVAKVSLIGVGMRNHAGVAAKAFNALKDENIDILLISTSEIKISCLIEEKYTELAVRTLHDVFELQNDVASLS

SEQ ID NO: 11249 - protein, 200 aa, Lawsonia intracellularis
MYNNLQNTPPMSSIVTKTYTQNSPPSVIFTISNPNSMTYFGQYIATLLVNYSFMPVILLYGEVGSGKTTFTRGLVQHFLYNEYAEVSSPSFTICNYYPTNPTVIHCDLYRCSHTIPEEIYELLYDHQGLVIIEWAEYLPEELFPTECIIFSLSLDEKNTRQISCYHHGVISAKIIDSLIQHQQVIQLKLMNTQNLSSPIV

SEQ ID NO: 11250 - protein, 298 aa, Lawsonia intracellularis
MEQYHGLLVVNKPQGITSAACTYYLKKMGQRKIGHAGTLDPMAQGVLLILLGHGTKIFNYLLEGGEKVYKATVCFGQTTDTWDREGKVLTTQSWEHITSEEVREHIFSWKGINKQLIPPYSAAKYQGQPLYALSRKGENTPHKTKKIEISCVEVLTINLPYVTFRVTCSSGTYIRSLAHSLGMRMRCGAVLTELTREYSYPFGLDTAIPFEDLVTNPDLLLDRIIPITAALPDWSIVVVNKSEVSQIKNGIPLFRRDTTCLSGKKTVLLLEDGTPLALAEAMNTSNGAVWTLLRGLWT

SEQ ID NO: 11251 - protein, 736 aa, Lawsonia intracellularis
MSFRKPPIRLATQVGGKEIIFETGYMATQANGSLTVQCGGTIVLVTVCSQPLESDKGFFPLTVEYSEKMYAAGRIPGSFFRREIGRPSERETLISRLIDRPIRPMFPKGLAEDVQILANVISSDQENESDILAVTGASAAVMLSSLPFECAIAAGRIGRLNGQFVLNPTINEIELSDLNIVFAASSEAVVMVEGEANVVEEEIIIEALEWGHKEIQPIITLQNKIQELAGRNKIPFVPVEENIVFSKKVEELADKFGIVEAMQVKEKQFRKEARKAVKEKVLAILKEDPLYAEHSDILNTVSEIIGNLEKKIVRQRIVKENLRIDGRDTITVRPIAIEVGLLPRTHGSALFTRGETQSLCITTLGSSTDNQRVDSLAGDTVKNFMLHYNFPPFSVGEVKPVRVSRREIGHGALAEKALKYILPSQNTFPFTVRIVAETLESNGSSSMAAICGGCLSLMDAGVPISAPVAGVAMGLIKEDDQFIVLTDIIGDEDAFGDMDFKIAGTTKGITAVQMDIKITGLTTDVMRKAMEQAREARIHILSEMAKALDVPRSNLSQYAPQHAELVVNPDAIRMIIGPGGKNIKQITTVTGAAIDINDSGKISIFAPTSEAMEQAKQMILYYDQRPELGKNYKGKVRKILEIGAILEIMPNVEAFVHISQLAVEHIAQVTDVVQLGEDMIIKVIEITGDRVRASRKAVLLEEEGITWTPEESSRFSKGNRNGDRSRHNNRERTRRT

SEQ ID NO: 11252 - protein, 477 aa, Lawsonia intracellularis
MSHFEAVIGLEVHVQLGTKSKLFCSCPTTFGTPPNTNICEICAGMPGALPSLNKLAVEYAVKAGLALHCTINTHSFFSRKNYFYPDLPNGYQISQGTHALCTSGYLDLTIKNNNKRIGIHQIHLENDAGKSIHSPHENKSFIDLNRAGVPLIEIVSKPDINTPSEAVAYLKSLHAIVTYLGISDGNMEEGNFRCDANISLRPYNSKHLGTRTEIKNLNSFRNVQRALEFEINRQQDILEDGKTIIQETRLYNSDKDITTPMRDKETAHDYRYFPDPDLVPIYVTIQEIEKWKGEIPELSDSRQKRFVIEWGLAHQDAEILTSSRELADFFEKAVKLYPKPKKIANLIKILLLHMLNEHNITIQQCTMKPEAIAELAAIIDENLISIKIAHDIFEDLFSKQLMPKDYVIKHGLTQISDTKTIDTIVVEVLAENPTEVAAYKNGKTKLLSFFIGQVMKKMQGQANPALVNQALHNILSK

SEQ ID NO: 11253 - protein, 212 aa, Lawsonia intracellularis
MNIHDCITMLIECFELQTQKTMLWHEELPEIEPPKLKTVYTPSIFKELVVIQHLFNFKIWHEEDIARRRDIEPILIAECKRSIDQLNQQRNDFMEQIDIAFLNLIQPLLPTNTNNVHTNTESLGMAIDRSSILSLKIWHMNEQVERSDVTIEHIENCKQKLHVLKEQHIDLNNAILNLVNEFHQGIRKPKLYFQYKMYNNPSLNPQLYSLTS

SEQ ID NO: 11254 - protein, 285 aa, Lawsonia intracellularis
MKTLKHALIVYKVGNPQAEKTAHDIQHWFYNKNVTSNLFSSDIPESQLKQSLVHTQVAIILGGDGTFLSISRNLIEKQIPVLGINFGQVGFLVEIHPENWPQMLEQLYSHKLVLQKKIVLSWSIIRHNQVIKNGFAINDVVVGRGALARVLAVDVSINKHHIGVIRSDGILVSTPLGTSGYTISAHGPLVHPDVQALTLTSVSTLFRSTPPLVLPLSTTITLTPSPHAIEPFLTVDGQEGFVLKPNDSVGIQGIKSGLLIYTTANYSYLQHLQKKGLLSSTDFNL

SEQ ID NO: 11255 - protein, 211 aa, Lawsonia intracellularis
MNKAFQLITSHLETGIKLRSEFFTAHASTIVEMARQIASSVACGGKIIIAGNGGSAADAQHWAGEFVNRFLLDRPPLPAIALTTDSSILTAIGNDFGFHLIFAKQLQAIGQQGDVFLGISTSGNSVNLIEALHVARKQRITTVGLTGKGGGGMAPLCDFLIDVPHQSTPLVQEVHATIGHMLCMLIDYFLFENVSAIQPLLNDPAPHENNE

SEQ ID NO: 11256 - protein, 309 aa, Lawsonia intracellularis
MKKITIATRGSKLAFWQANYIKDQLQKMYSYLEVDLMVIKTKGDHILDVPLAKVGGKGLFVKEIEEALLSGEADCAVHSMKDVPMELPFELCLAAITEREDPTDMFLSIKYSGVKSLPENALVGTSSLRRQAQLLALRPDLQIIPLRGNIDTRLRKLMAEEFDAIIMATAGIKRLGLIAPYMSSLPCSVMLPAVGQGALGIEVQKERQDVLELFSFLNHKETYHCIQAERDFLAGLDGGCQVPIAGYATICKQETICLEGLVAKSDGSVMIRNRLERSVSDAYDIGMTLSKILLAEGADDILASMHTIL

SEQ ID NO: 11257 - protein, 817 aa, Lawsonia intracellularis
VAKVLPLPVSRLCARLSPDRIPWEVSSEIPKNVSHRLSLQPRVHKALERALAITISGYNIYLSGEALLGRSYLLKEFLVPRAKKMQTPPDLLFVHNFNEVDKPCLLTVPSGQGKKIQTGLTKVLSEIRKQVPLWLENEEYIKKHNTIKDKFQSSRNKLLKEMRGVANKQEFNVDLDEHGGLTLYPLVEGKRLSEDEFNRLDVNLRQSLKQKGDNLLSSMSSMVRKLRNAEKTFQSAEKNLDQEVITNLLDKLFVPFVEEVLRHCPDNKSLKNYFNELQKDIFEHPESFITRDNASIALHQQHDVSQLCPTETEQYRYYINIFVDNSNTKGAPIVFEDHPTATHLLGCIEREAEMGALITDFTLIKSGSLHKANGGFLILHLDDILQHPLAWEGLLLALRSGVSTLEDFGETTDGTIRTKGIEPESIPLDVKVILVGNEDFYERLLEHDDRFSKLFKIKAQLTTTTERTAKGIRSWLFQLSKIIDDTMLLPFDAESLAGLVDYSSRECEDQKKLSLRFPLIRDVMIEASAIANMAGNELVQKIHLDEAIASRLNRVNLVEELFIEEYDRDLIKVMTTGWSVGRVNGLSVSWYGDFEFGLPHQISCTVGVGHGGIIDLERESELGGPIHTKAMLILKSYLVDQFAKKKPLVLTGSLCFEQNYAGVEGDSASGAELAALLSAVSGVPLKLSLAFTGAVNQSGQIMAVGGVNRKIEGFFEICSRRGLTGEQGVIIPYDNIDHLMLNPKVIEAVKDKKFAIYPVKHITEALELLTDMPSGRPLKKGGFSPNSLYDKVDSRLQELGHLAEHAFSKTYRKKTRK

SEQ ID NO: 11258 - protein, 400 aa, Lawsonia intracellularis
MFKHDYTLPMPFREALPWISAVSLLFLCSYMTRSTLAPLLVYVENSLQIGHIQSTSLLLMQSIGYSISLFSCGFLLSKITPAHMVAFSVFFSSICLCLMPYVETLSEARLLFALLGFGCGFYFPAGIAVLSTLVYPSDWGKAISIHEVAANLNFILIPLLAQLFLQVTNWQGVCAYLGWPMLVLSILFIFFGRGGQEHVPLPSYSGYKELLFTPASWAVVILLIIAQAGEYSVFSILQLYLTDEVGFTPGSSNILISSSRLITPFIVILGGWASDRFNVYFIIKFCLILHTLALTAMAFDIPSLSIIGIIFQTISISCLFPSIFKAFAIRFPLSQQALLMSLSMTSSGLISNGGITMFLGYCGEHLTFGIGFICLALYSIGCIWITNLLKVKVKQVIVPN

SEQ ID NO: 11259 - protein, 160 aa, Lawsonia intracellularis
MHINIVRVRHRRLQLMYNTQNLSLRTFFSPQILPVKSKFSQVSAIQKTVILTGWLEEHKAQNVLAFDVVNKNLCMDIVVILTATSSRHAKGLADGILEECTKQNFEYLRMEGYQYGQWILVDLNDIVINIFQAGIRELYALETLWKGCPLLNGQLATNTL

SEQ ID NO: 11260 - protein, 510 aa, Lawsonia intracellularis
MNVVPILLLILDGYGLAPDSTGNAAKLAFTPNIDRMLAMSGGTQIHASGRAVGLPDGYMGNSEVGHLNIGAGRVVYQQMTRIDVAIENKELDSNPILLDLFTKVKSSNGRLHLLGLLSNGGVHSHIRHLEALLSIAKEHNIQVILHPFMDGRDTGPKDGLKFMKEIVSFLTSTSSGVIGSFCGRFYAMDRDKRWERIKLAWDAIVHGVGLHVEDSVKALEQAYASGETDEFIKPRVMGNSSVNCVQDNDAVLFFNFRADRARELVSAFILPDFNGFDRGRVPHLSGIATMTMYDKEFNIPVLFNHENITKTLGEVVSALGLLQLRIAETEKYAHVTYFFSGGREEVFTGEERILVQSPRDVATYDLKPEMSVMEVTDRLLTAWNSKKFSLIVCNLANPDMVGHTGNIKASISALEAVDNCVGRIEKAVAEQHGCFILTADHGNVEEMLDKSGQPQTAHSCNPVPLIAIYDGKPLNLKESGKLGDIAPTILSIWDVSIPNEMTGNNLLSSE

SEQ ID NO: 11261 - protein, 120 aa, Lawsonia intracellularis
MSKSLALYDEALHIGQLELDALKAEEVEKADEYCNHRAQLLENAWNIRDAENEQIRSKLLAIKTLQEELIQEGTKLKTNIQQQLSASKKQQKVLKGYKLSVGQATSMLDNELHKLSIIAQ

SEQ ID NO: 11262 - protein, 201 aa, Lawsonia intracellularis
MIIIDGNKTDMQIKNFSNLEEILLYAASDSRLENRIVTDVLLNDELFSELYPHQAEDIPTNEINSVEIRSIPFGEMAYNITEELLKVSNFIATGSKEVAQHFRRGEDDEGLELFQDLLDVIRDFMTMVSVLRTDFIVTDDNVFADCSEQISSLLSEMTDVLEQEDWIMLADLLEYELIPACERWNIIIEELRKAIQNNLGA

SEQ ID NO: 11263 - protein, 530 aa, Lawsonia intracellularis
MHAIVINLSRFGDLIQTQPVITALHQDGYQVGLICLSSFVDATSCLSHITYVNPISGGKLLSLIEQNWIYALANFQEWIEQIYNTFPPNRILNLTPHIPARLLAYGLSQSIIPVEGFSVDKYGFGVSDSMWAKLFEASTKKRRCSPYNLVDLFRMISHVEHIPACYKLKLPQKTNLLTSTTHFKNHIFETNKQYLGFQLGASSTLRQWPVSHFAQLGKKLYNQLGIIPVLFGSESEQHLAQEYIKTGAPCIDLVGKTKIAELAAILLHISLLITNDTGTMHLAAGMGIPSLAIFLATAQPYDTGPYLEDCCCLEPSLNCHPCDFDTTCPIDTICRTTISADAIWPLLTYRLTNKKWPEKAPIETSTVARVWITTRDHYGFFNLQSLSGHDKEDRSSWLYIQRYYYRQLIDLLDNPNTTKSYRPLSTKVISQLSQNVRQQASNTLEQISSLLKLLEQQGLLLSEKHISQFGKKFLSTTYNITELLEQNELFTALGIFWKMSIHEHADNLSHVLTIANSFQKIITKWNNSLK

SEQ ID NO: 11264 - protein, 273 aa, Lawsonia intracellularis
MSVTIHPTAIIASSAQIGIDVTIGPYVIIEDDVNVGDRTYIDSHAVIKQYTRIGTDNHIHSHAMVGGQPQDLKFSGEITWLEIGNYNKIREFATLHRGTAGGGGITKIGNNNLFMAYTHVAHDCILGSNIVMSNCSTLAGHVHIDNFAILGGLSAVHQFCKIGEHAFIGGMTGISQDIPPWMLITGRKGIIHGPNLVGLRRANVPSTTIAAVKDTFKLIWKSTIPRPESLKTLEKKYPDVPEVQSIIRFIRNSERGVCNTASGSEPSDELDLL

SEQ ID NO: 11265 - protein, 153 aa, Lawsonia intracellularis
MSHPLPPNIQEILQLLPHRYPFLLVDRVIEFNAGKYIKAYKNVSINEPFFQGHFPGFPVMPGVLILEAMAQSGGITVLQSFPINELQGKVFLFAGIENVKFRQQVIPGDQLILECEIIRHKLQLWKMSCQAFVNNKLVAEAILTAAMTNKENF

SEQ ID NO: 11266 - protein, 341 aa, Lawsonia intracellularis
MPQYKLSEIAKLLNLTLQGDDIEVVGVNTLQDASPNEISFLANAKYIHQLVLSQAGAIILSKEYASRVPRALISTEPYRDFGRVLSLFSIPQGCFDGISHQAYIHPTAQVSKTATIYPFVFIGSHTVIEENTTLFPGVYIGEHCHIGKNCTIYPNTVLMANTSIGNDCIIHAGVVLGSDGFGFALTEEKQKIPQVGNVIIKDKVEIGANTTVDRGTLGTTTINENTKIDNLVQIGHGVTVGKNTVIVSQVGISGSTSIGDNCILAGQAGISGHLTIGNNVTIGPQSGIGKNIPDNQILGGSPAVDRQTFLKTSVLMPRFPELFKRIKKLEKILEKKKEHNI

SEQ ID NO: 11267 - protein, 186 aa, Lawsonia intracellularis
MKVKTLSMAILACLLVANSAFSADFPIGVFNSQSIAMESEAAKAAQKKLQSEFGNEKTQLEKQAKDLQTKADDLQAKSAAMSNQAREDKQREFLELRRNFEEKSRDFAIRVEQAENTLRQYLAEQIYLAAETIAKKKGLKLVLDSASGSVMYLEKNLDITKEILEAINAAWKKGGSKLPEMANRKK

SEQ ID NO: 11268 - protein, 600 aa, Lawsonia intracellularis
MSNIICRQAIAILSNYIYWKKLLWIPILAYFIVITNNNIIQAAAPTSPGARYEEAKKALKNLQSDSINQKLRDPWLKISDLFFKIYTSFPDWINRPFALYYSAVALDELAKHSFTVSDAEKAIKCYQSVITKYPKRTITESALLNIAKVYAERLHKPNDAKKYLQKLLTDYPKSDKINEAQIYLKSLENLKEEPQKTSTTSTSKAKEAFHSTSKQKNSHLQKKTSEKTLAQLENIRWEVKKSYLKLIITLTEPITWDVISHPANPKTGNPIRLLIELHNTIPNPCIKPGICIKQNKLEKLRVDLSTPTVTKLLLDFSDLKTFKVETTHNPFQLIIYTSPTPDGIANGMKIGQTKHSHPKSTSPKPIVAHDLAQQLGLTVKTILIDAGHGGKDPGATHNGIIESELTLELSKKLGQILAAKGFTVHYTRQNNTWVALEARSRKATTVKADLMISIHINANKNTQIHGLETYYLGLARSKESTYIARIENSTSEKTLNDLDILLKDVMLTSKKHESRRLAESVHQNILTHLIQKNYNTHNGGIKSAPFHVLIGPKIPSILVEVGYCSNKAEAQRLASSNYQKALIEGLAKGIFCYLKKLQSP

SEQ ID NO: 11269 - protein, 884 aa, Lawsonia intracellularis
LCNILYCNIIANAASKDDPSIVVLPFQINGSSNDEELQTELPMLLATALKNKGFRVIPNKSALNLLYKQNISQLNISTAKKVAQQLHADYVVYGSFNQTGENFSIDSRLIDSTGVASARPLYIEKPKFNELNIAVTELAERISNGLIKKNTIADVRIHGLKVLDPDVILTRLTINKGDHTDHAKINAEIKKIWELGYFSDVSASIEESGEGRLLVFTVQEKPKITDVVVQGSKAVSIDNILAAMSSKKGSVISDRLLSQDIQKITDLYRKEGYYLAEVNYEIKEKENTSSATLLLTVNEGKKLYIKDVRIEGLETIKAKTLKKELALTERNFLSWFTGTGVLREEYLERDSIAISAYAMNHGYVDIQVASPEVTFNEKGIVITFRVKEGKRYKIGKIDFKGDLIETNEQLLKVTKIDDHKNYEQYFSLSVMQDDVKALTDFYSDYGYAFAEVDLETTKNEEDATIDVTFLIDKKQKVFLRRIIVEGNTRTRDNVILRELRLADGDLFNGQHLRRSNECLNRLGYFNQVDTDTLPTGKDDEVDLLVKVQEARTGAITGGVGYSTHSKFGVSGSISERNLWGKGYILSIEGFISSKSSSLDLSFTNPRVYDTDFGFSNNIYTLRDEWDDFRKKTYGDTIRLFHPIGEYSSIFVGYRIDQYRLYDIPSTAPRSYLDYQGKNISSVVSGGFTFDSTDSRERPSKGHIAKLIVEYGGGGLGGNDNFFKPIAELQGFYSISRSKNHIIHWRTRAGAAYKNSKKPVPVFDRFFIGGIDSIRGYDTEDLAPKDPRFGDEIGGDRMAFLNLEYIWTFQPELGLALVPFYDIGFQTDSVQTSNPFSKLKQSYGLELRWRSPMGDLRFAYGIPLNKNVSGKKTRGRFEFSMGQFF

SEQ ID NO: 11270 - protein, 235 aa, Lawsonia intracellularis
MSQYLLENIVKQYDSPSEPICVLHKINLSIAHGESLAIIGASGSGKSTLLHILGALDIPSSGTVLFNNKNLSHMGPNEKACFRNKLLGFIFQFHNLLPEFSAEENVAMKALIAGIPKKKALLLAREALGSVGLENKYHHRITMLSGGERQRVAIARAILLEPQVLLADEPTGNLDQKTGEHIANLLISLNKTFNITLIVVTHNNDIAHSMGRCLELKSGDLHDKTPEYISSTVTV

SEQ ID NO: 11271 - protein, 427 aa, Lawsonia intracellularis
MKFELFIALHYLFARRKQAFIYLISLMSILGVAIGVASLVVVLGVYNGFTIDIRDKILGANAHIIITGNFDSPIEEPTSFTQLSTTSMLSQNALIILNKLQQTSAIIGATPFIYAECMISSPHGVKGLILRGIDPSSAQNVISMLSHLTKGNLEDLIPKVLGTPDGIIIGNELAQRLNVTIGSRVNLLSPTGQKTSSGFQPRIRPLIVTGIFHTGMFEYDTSLAFTSLNAARELLGLPHNYISGIEVSIHDVYQANYITNQLQQELGHNFSVRSWMDMNANLFAALKLEKIGMFIILAMVVLIGSFSIVTTLIMLVMEKTRDIAILTSMGATSQMIRRIFILQGTIIGIVGTLLGYLLGITLALLLQKYQFIKLPPGVYTIDHLPVLLNWLDIFIIGTSAMLLCFFATLYPAHQAARLQPIEGLRYE

SEQ ID NO: 11272 - protein, 457 aa, Lawsonia intracellularis
MLRAEYEAYSASELESLDEIFACAGRIISLRSFGKVIFFHIMDRSGRIQCYASRENMGEEAFSTFKKFDIGDIVGVNGKLFRTKMGELTLNCSTITLLAKSFRSLPEKHNGLTNIELRYRQRYIDLIVNPKTRDIFRKRSKIIHEIRAFLEENGFIEVETPILQPIPGGAMARPFTTHNNAMDMTLYMRIAPELYLKRLLVGGFEKLFELNRSFRNEGISIQHNPEFTMCEFYWAYATYLDLMELTEEMFAYLTKKICGTMTISYQGNTIDFTPGTWQKYTFHESLEKIGGHSPEFYNNFEKVSEYIKEHGEKVLTTDKIGKLQAKLFDLDVENKLIQPTFIYHYPTDISPLSKKNKDNPEVTDRFELFIAGKEIANAFSELNDPIDQRLRFEEQVLEKARGDEEACPMDEDYLRALEYGMPPAAGEGIGIDRLVMLLTDSPSIREVILFPLLRTER

SEQ ID NO: 11273 - protein, 274 aa, Lawsonia intracellularis
MKNFFVLLYIMALSVVHVSASSLELFKDQSGVLDIAGGTAHLPVMKQAAKNIMMVNPAIKITVTGGGSGVGVKKLAEGLISIGNTGRPLKEFEVEQYGLVSFPFAIDGVTIIVNPSNPITQLTKLQLKKIFSGKIRNWKEVGGNNAPISLYIREDGSGTREVFEDKVMHKTHPYKKANVFNSTGSIKTAISQDKNAIGYIGIGYLDSSVKGLVVDNMIPTQENTFNGSYTISRLLYMNTKGEPKGITKLFIDYIYSPDGRDIITKAGYIPIERE

SEQ ID NO: 11274 - protein, 276 aa, Lawsonia intracellularis
MSWLKVSIYFAVSIVLTGILVLITMLIALALPIISNTNLEKIISLTWQPNEGYFGILPMLGGSFFLAIFALSLAWPLALGLNIWMLKVDKRFLARVVAYFIKLMIAIPTVVYGFVAVFLLVPLVREGAGGTGFCLFSAGVILALLILPTITLVFESGLATSLEKLRLEGIALGFSRLELFYFFVLPKSKKIFVVAAIIGFGRAIGDTLISLMLSGNSPQLPQNIFESIRTLTAHIALTSANEMSGMAYDSLFLSGILLLIINATVSILVRHIIKLS

SEQ ID NO: 11275 - protein, 296 aa, Lawsonia intracellularis
MNQVFLFLFSLLASFSVVIIMVVICFFIAFLIWNGLPTLNIAIFFGNVPPLRALLGLEPVWDGIWPAVLGTLELIGITLSLAIIPGIGCGIFLSEYASASQSYYIRWLVDILSGIPSIVMGLFGFLLIIFLRHTIWPEANTCLLLAGGCLALLVLPTIIVTSQEAFSAVSNELYLSATALGFTKEQFIWFIKLPAASRGLWGGVLLAISRSAEDTAVILLTGVVANAGLPSGLGSKFEALPFIIYYTATQYQTQQELSQGFGAIIVLLFLIVSLFCIARLIGSKIYRFSYREGKCL

SEQ ID NO: 11276 - protein, 257 aa, Lawsonia intracellularis
MSIAVHVVDLTVSFHQQEVLSHITMDIPSHGIFVITGRSGSGKTTLLRSINRLNEEFDGCVTKGYIEADLGYGLKSVFPSIQKNFTLSKLRQKIGMVFQTPNVFPTSVYRNISIPLEQLTHYAKKDIPTYVYSALDRVGLLQEVENRLDIPAHYLSGGQQQRLCFARMLALEPAILLLDEPTSSLDIHATQKIESLLLELASEYPIIMVSHNITQICRLAHEIVILEYGTIINKLTEKAYYKEILTSIIEHNINIIN

SEQ ID NO: 11277 - protein, 151 aa, Lawsonia intracellularis
MDAQSLIKELGPIINLPDLALDENNVCRVEFDDMPVDFEALPDGSMLYIYAQVSPVPPPGRREKLFTRLLTGNLFGGETLGSTLGYDINQESIVMHIALAVEKNSFSDFQTTLERFLDRLKFWREECQDIVLGSGNRDNAEDVNYKDGLRV

SEQ ID NO: 11278 - protein, 469 aa, Lawsonia intracellularis
MVNSTSHYSSDIYISNPMPIAPHNRPRENTNRNRGRRIFLALISLGMTELARLALRAYRTRHTPNNNTPQVRQAQIAQHNLQIIDSHLDPNKLPMFPRVKENVIMSTSQFFEGIDVPNPKNFIDSALQQLRNDITNYPKLSEKMFKELLSAKLNDTVLKEHIINKVTSQISTTSDVNLGPIVQFLLTKFNSEIEGVLTGPPSMLKESIEELNRHIIISTKNIIIQEKVIDKCIETGLKAVLNALNATPQEVMALPRQTILTKLYTAADNIEKTANQKNGTPTEIPACVYEKILSQLSDSFYSTIIQAGILTNAATKDSHITMILLEKSMHIVSNSNISPLIEKITQSPEDIKEKKRTAIQLSRLLCDQARTVFNNEWDIYPSNKQNLILSVVYLLTKLNHPQLQDTTVREQLSVLAKEIDKDGLNLAKKLSQANSNEAAVTRLMAQSNFLSKTLIMILSFIGGKGYGLE

SEQ ID NO: 11279 - protein, 463 aa, Lawsonia intracellularis
MPISSTIQGIFDFLGSSRAQNRPDQPTTVPTASYFKIGCRVALGFATLGVSEIVRYAITAYQATYGNSTAKVEKHRVQYFNKEVIESDLDHTKDSKFPGTAIKVLNKTTQELKESGIEIEDPQSTLDETLLYLKKEIIKLEDRLDSEHYCKLLCDSLKLTALQRCIEAKVKEAYDKDGRQVEQSILERAIKRRQKLITALGEVPPTLLKERCNELADYVYTTCLNIEKEDSIIATVIDTVAKGLAWAFNLNSYQTNPTLRETVGNVLKKEAEETEQEAQKNNKGPIKAVPEEKYKERLSSSADSYFQCIKDVGMHLSKLVKDKQKCFKIITSGLKAYEALKESGTIVVICNPLITPEELRKQLPTLYHELELCLITALGEDDWSDLSQHQKELYLRVLCALLTRKHKILGPFLKENQLLIEEVKEQLEEIQQRNNEEGETSSNADDISSSLTLVNLFLKKNTI

SEQ ID NO: 11280 - protein, 343 aa, Lawsonia intracellularis
VDCSIKNKKGKNTMEINPIPIGSINILTTQSLTESQSTEEAKIEQQKSSQSKYVLRTKGIPRIALAFLSFGITEVVRAVQSYQAKRIISQEPRLSTEFDPSLFKNKTERYNARLLKTVFEDTPNTSTSDVLKNAIKKVEKELEQSSIRKNPDAQPIIKRAYQQLWLTPNKQHKLTEEELSTIISKEIKNILIKEQVIKELQTELDTRGVKYDQGSLAVLLQRKAKTIEGLCYYSNERLSQELTSIVIKVANLAESLQNYGKAKREIKQLYLEVKGIDINSQEAMQDTELRKLLLAIDEKAEQYEARETSRNGGEMPVIPIGAYRYIFTQTAEPFFDTLETQHT

SEQ ID NO: 11281 - protein, 318 aa, Lawsonia intracellularis
MQVQLRNVSDSSQNLENVQATENKQKANTQDGQPRVGKGAIPRIMAALNSAVNFVSSTLQEYKTAILTTTQSTSVQQNEIRLQNRDLISQMLDPNQPQPFPNAIDNATKQTIKDLAGISHKEVGSITSTALNNLSMSITKLETKLTDDIMTSLLTTEMKNILLKDVVVQNLKNELGTRGVPNDEGAMATLLMTKQYEMGALARTPNENLQKTIENLVTSMSDNAVTQRNYTQAKNEIQNTYIEAIMVNKDMTKQEASQLPELKELKLKLDQAALELEETYTTKNGGQLPEISLQDYREIFQGVAAPYLNNIGINATIL

SEQ ID NO: 11282 - protein, 332 aa, Lawsonia intracellularis
MLMPMLPVRFTGPTNQTPVDDREQRTKVLAQIDHQHQAEPPRSLGQRILTATGLARVGWGLGTLGLSELARALHGYNTRESAGAAPRALANQQIQRENRQLLQQLHDNVATGQFQFPHQEAVESAMEKAKTDLQGIASTDPRHLLGRSILSLQSKPSAFDEPITDKSLSHLLSKELKQEMILEEANKQLRHALGKRGPWGYGADRAGLLSERSKDIRGLTNYPPDQINRELEKIVSEMVTRGENLHNSSEARKSALSAYVQAVMDRFQLTNAQVTGNPEYKKLKLLLDESAGTHERQLTARNGGLMPLISQSSYEEALHRTTQQFLIELGVR

SEQ ID NO: 11283 - protein, 228 aa, Lawsonia intracellularis
MLTLPTVFIGSPIISDIDKPPFITTRQQTLTTPSNSSKYLHRICLSLITLGIYELIKVTCSIFNSKSKSSFFSMEKDEYSDYGYHILQPLSEEKTLLPNNIKRTMENIQNSFTATTNTAPLPLAKYGLEIPQTKTNLTKENIIKKLIQELKLIIIKEKILSDLHNELKNKNIYIDEIDKSYLLHTEHTKIVSLALNPDYTMSKEIKQLVYKLIKYIETKYNHIINYNN

SEQ ID NO: 11284 - protein, 381 aa, Lawsonia intracellularis
MIIEHSPYTQGPTVATDRNLSSTQQNQRRWPQGISRVLLAIVTLGVSEAVFAIQSYCAQRNQNQQPRVNQTQARQYNKKLLEDMCNPNKEFPYPNAIENAVQKVEEELGSYSEDSPEDILEKALKALKPEVLQLPTCLDEEVFTTIFIQKLKELLLQKVLIEEVKIECDNRGIPVSSTSLLILTGEKPELDISGCISENETKLKVEQAVSKLANTIENKHNSDKAIQNASIKLKNLIANKTGIRSFLVSTHCNYKKLCENYKLATIVLESTIKTKHTENNVPVIPAILFEKLAEELCKEQIQDFENQNHTQISSAQQQYRPKTRQERIEYLKQSEKKAREKIDAERAATLVGATSRRTDSIQSRYEELVKKLLSELEQQVT

SEQ ID NO: 11285 - protein, 339 aa, Lawsonia intracellularis
MPAFPTIFGGPIVSGIERSSRIPTQKNTTNRPCGIPRILLGIATLGISELVTAVQNFRTAKQLSSPDVQRNIIRLYNYNVVDSMTNPYQESTFPGAMHEALALACSDLRKYGFKPDVQKHLSHSLKTLKMNTPQMKEKLTYELMVMYLSQEIKYHCLEEIVSSLIQSKLSSINPVTGCLESVDEQLIKYIIESRGKQTLYKLAALPSPNKRSEKMKLGDSVVQVTENLGNQLQNMLNSTYVLNRIKEKICTLLITSGQYTEEDVRQSKLYKDTANNCRITLDMDDHKIRREHRNNTPRKSVEDYQKLLSSEITMLQRQLQTYNSSSHNNSNSSIVSTSI

SEQ ID NO: 11286 - protein, 308 aa, Lawsonia intracellularis
MSAVSTISNGAIVSGTDKNSKTPTQQSKNRSHGIPRILLGIVTLGISELVLAIHSYYTRKAQAQPPQAMRTPLNGVRHQNYKIICSSLESKTSPFPEAIQNAILDAQDCLKPIITSVDENILKQSLSGLQMRLHEFPEPFTSQSFELELTKEIKFNLVKNLFSKTLIERLQQEGISEPPTECISQMCTVETSTLKQISTMPKEKISEAMNKLILKSTAIILSNDNAKQARKKVLEDLKLDLITQYSISEQEAKEHSKYKELSTKLVKCCTELQDAKQAEHPGEYPVVTVDMYQDAFLKFNQSFLSSLM

SEQ ID NO: 11287 - protein, 334 aa, Lawsonia intracellularis
MRGVTSRISNSSSTQHIVETHFKETNTDSSSQFGQTKMNSSGTRRIILAALTLGISEAVRAISSYCTKSSEHQGAQVAEKESPRLRAREGTPLNEAARRHNYGVIHSTIDPKQDSPFPEAIQNAMVSAQEYLKPIVTPGHEDILTRSLTTLQMRLHEIPEPFTSQSFELELTKEIKLTILKNSFSDSLIQELQQRKVPPQPEFISQLRTIETPVLTNISNMPKEEIPEAMNKLILKSAATIHNAHNSKQAREESLSIYQHVITSRYNISEQEAKKDNGYKMLETRLMECSTELQDAEKAKHPEYPVVPLRTYQEAFIEVTAPFLAIFGVTETKF

SEQ ID NO: 11288 - protein, 323 aa, Lawsonia intracellularis
MQITILSGKETNPGDNPWTPLEALGKLTVYDLTKPEQTVERAKDADILLVGRDILTTEHIEELPKLKCIGVLGTGYNQIDIETAGKRGIPVINVTAYGVDAVAQHAFALLLELCRHTAALDQAIRNGAWSSPDWAPWKYPQVELTYKCFGIIGYGNIGQKAGYIAHGFDMSVLAYDERPVQPPSYTPFSFADLDEVFKNADVLSLHCPLTEDNFHLVNKKRIETMKDGAIIINVARGALLDEQAVADALISGKLGGLGSDAFVDEPINLNNPLLSAPNTVFTPHIAWESVEARRNIVRILAENLKAWMDGKPQSVVNTEYLVK

SEQ ID NO: 11289 - protein, 204 aa, Lawsonia intracellularis
MLFQCLLIILLLLPGCGLLYRSPIPTYYVLQPSIKLTQLLTSKHDITGPIVAIDTITIPGYLDQPQIFIREGEATVVQFAELHRWSESLAEGINRVLQQAISNVLAPINGLAVGPNSMIKPDWILTVNIFQFDGAPNNEVILDAIWTLSSSTHKISHTGRFTKKLMTGPSITDMVITEGILLEQLGTFVGDEIRSHLPYELLKE

SEQ ID NO: 11290 - protein, 319 aa, Lawsonia intracellularis
MSHQVSKTLIGAFVAGSILLLIIAIIFFGSVKLFNSTATFVMFFDKSISGLSPGSPVVFMGVPVGRVIDIKVDKISNDIGFTIPVYVELYENTHTIFIKHNLPQEEEEETEYLNNLIKQGLRASLAQQSLLTGQLMIELNFITPESQMDTTHVVFYKGTPVIPTVPSKLDNILKELTSLPLDKISGNILEITNSLKILLNTPETPNIIPQLSNFLHQGLAAVAEFNQSLIDIRKASKKYGTMVEGLNTELSLTLKEATKSFQTINNTTERLLGNNSPTLLDIHHMLQEVSKAAKAIRILANMLERNPEVLIRGKGINQK

SEQ ID NO: 11291 - protein, 262 aa, Lawsonia intracellularis
MNTTNEPLITVKNLTIAYDDYIVQKNLTFTINKQDIFIIMGPSGCGKSSLLRALVGLHRPSVGNVYYNNVDFWALTEEKRLEQLHNIGLLFQSGALWTSMTLAENIALPLERYTKLSIAEIQEQVSLKLSLVGLSGFENYYPSELSGGMKKRAGLARALAIDPKIVFFDEPSAGLDPISAGMLDELIVELTSNLTMTVIIVTHDLDTILSIGTNSIFLDTATHTILAQGDPKQLKENTHQPEVIRFLTRGKQPTQYTLGSPL

SEQ ID NO: 11292 - protein, 386 aa, Lawsonia intracellularis
MLQNTTHLPGKDDLPPSANITLFRQTLEISFSGNWQLNQPIPDATRFASQLNYPVVKELYLKTNSLGIWDSSLIAFIKTLINKAQSQQITINDHELPAGIKNLIQLAFQTPPNKEAHKKTTQISFLEYIGDITLSLPSTIQKILTFLGEMTLSTKRLITGHSDCSSTNIWRCMQQAGVEALPIVSLISLLVGLILAFVGVIQLRMFGAEIYVSSLVAIGMTRIMGAVMTGVILSGRTGASYAATIGTMNVNEEIDALMTFGIRPSDFLVMPRLIALTTMTPLLVVYSDFMGMLGGFIVGVGVLGIEPLEYINFTQKGFALKNLWVGIIHGIAFGIIIAITGCYQGLNSGKNASAVGLATTSAVVYSIVGIVIATACLTIIFNIFNI

SEQ ID NO: 11293 - protein, 189 aa, Lawsonia intracellularis
MTDHTPLQPKHEITDQADQDTSAEMLVEEEDKKEIGPNYITEEEAQEIRLRALAEMENFKKRLQKDHDEQIRYAIDNLLTDMLPVLDSLDLAIQYGSNDDACKDILMGVSMTRKLFLDTLKQYGVTVLGEINEPFNPELHEAIAHEEREDIPEGHVSTLHQRGYQLYERLLRPAKVSVSSNKNNSNTNK

SEQ ID NO: 11294 - protein, 244 aa, Lawsonia intracellularis
MMNSRIIQWVVLSVCMTQLLACGSLFRGFTGETLVSDAQPSLSVTVKMPMLTAGQITPYLYTDYGYQFPVTFIAVYGVNENSPMAISTLSFTPNNWQWDPLSFNMVDSPVTSYESFDGHNFEGSTHIINGAKDPFTILVAPQERLASIYWLVQRYAYRAFFNKAKIILEYREPLPSNLSETTKLSVTNPEIQAFQQRAITAFIVSFNYKGVEKPTAPYLKGINSRMVGNYLGSMSFIEPRMIEH

SEQ ID NO: 11295 - protein, 288 aa, Lawsonia intracellularis
MQPYFVDLHTHTIASDGTDTPRELVIKAAKLKLAAIAITDHDTIAGLEEAEQAGRENQIEVIRGCELGVTSKYGEIHLLGLWLPYDNISLKEMFKTLLKDRHDRAKLIISKLNKLGYNISYEEIIANIPGEAIGRLHIAQHLTQKGYFVDTKEAFKSCLGHNGLAYIPKTTISLKEGVRVLVDAGAMVSFAHPMLLRCPKDWLEDTIVMLKDYGLSAIEAYHSEHSQKDERYCVDLASRYQLGITGGSDYHGSGKSNVKLGRGRGGVRMTLAMLDVLKERHFRINQTI

SEQ ID NO: 11296 - protein, 937 aa, Lawsonia intracellularis
MTDYKETLNLPNTTFPMKANLVQREPEIILWWEENAVYEKMLEASGAKGIFILHDGPPYANGHIHLGTALNKILKDIVIKSRNMQGYRSCYVPGWDCHGLPIELKVEQELGKKKQEMPLSLIRNRCREYAEKFLDIQREEFKRLGVFGSWDHPYQTMDPIYESVITLELARFVEKGSVIRSKKPIYWCYSCETALAEAEVEYADHTSSAIFVRFPIHDKRLHTIFPQADLTTTSIVIWTTTPWTLPSNMAIALNADFDYALLQYKNEYIIIASELVDICLKQFNWEDAKVIKVVQGKDLEGMKARHPLYDQESMIVLGDHVTLEAGTGCVHTAPGHGPEDYEVALRYNLDVYSPLDDQGRYLDTVKFFAGLRVDQANPVVIQKLEEFHRIIQKNTIQHSYPHCWRCKSPVIFRATTQWFISMEKNNLREQSLKAIKKNIEWIPSWGEDRIYNMIASRPDWCISRQRIWGVPIVALICESCGEVWNDPSWMKKIAEFFAIHPRGCDYWYEAKLEDIVPVGLKCPHCEGEQWKRESDILDVWFDSGSSFAAVLEERPNLGFPADLYLEGSDQHRGWFHSSLLISIGTRGVPPYHAVLTHGYVVDGDGRKMSKSMGNVTSPQEIISKFGVEILRLWVSSVDYREDVRISNEILQRLVDAYRRIRNTCRYLLGNINDLTLDELVPVKEMESLDQYILDVVATAYTEIQKSYISYDFHTVFHKLHNLCTTDLSAFYLDILKDRLYTSGVRSHKRKSAQTALFYILHMLLRSMAPILSFTAEEVYKYIPDTLKDDNVISVFMLPFFETSSFLLDDRVRSYWETLLLIRAEVNQAIEPMRKKGEIGHSLDTHITLYVAPELHTLLLELNTDLCSLFIVSQLDIMPLSEASVDAAVSKIDGLAVAVNRAQGNKCQRCWMYKELGSNHQYPTLCPRCTEVVENMKI

SEQ ID NO: 11297 - protein, 164 aa, Lawsonia intracellularis
MRYCIISLVALIIFLADQLTKFWITHIIPLYSSINVIPDFFDLVNIRNRGAAFGFLNRSDIEWQFWLFLGATFWAIVIIFFLARSAHSNERFLFWGLGCILGGALGNLFDRLRIRAVIDFLDFYIGDWHWPAFNVADIAICCGGFLVLISMWHNEKIKRNTIKE

SEQ ID NO: 11298 - protein, 305 aa, Lawsonia intracellularis
LLEKERYYHTTILCLGWGTMREKVAMVLILGSLLCISGCFGQNTDTLRHQLDQQQEEIRQLKAQLSGVQPAQADTWAQVQSLRQELASITGQIDDFNHATGAVGGIAGLASKVEKNEAAIRKIEKQFDLKLLDDQPAPSSPISNTASPPVTPPQMNSSTGLNNESGAQTNSQPKQSTPNKIDTATVLYDTGVKLFNERKYKEALQSFTDFTNTYGTHKLISNAWFWRGEANYQLGSYPAAALDYEQVISKYPKSGKIVSCYFKQALCFYKTGKKDAAKFRLEEVIKKFPTSPEAKRAKQILKSDF

SEQ ID NO: 11299 - protein, 260 aa, Lawsonia intracellularis
MPDPKSILQDDTIQKVVTDVTDKILKELYEILASELAPKISSTLIQPFLESKFYQRISNDMQDGLKRIYKEISTISDSPVNTVSVDKVKTESLFHEASEQLSEVLKQTEKAAIAIMEVVEQDIVLQEEATTLLTKLNSSHINIDPDFIRLKEIIHLFGEHLSSVMLSLSFQDLTGQRIKRAVSALKEIEKTVVELYLSAGLLMQARDKNPNKSIDEIEADTRQQVLALKDIQIIGSELKGPTSGVAQKDIDELMAKLGMD

SEQ ID NO: 11300 - protein, 371 aa, Lawsonia intracellularis
MATVWINAGEVSGDLQASVLLNAMKEYQPDIKAYGMGGEYLKAAGQKNLFSIDELSVLGIAEIFTTIPRAIQILRKIKYELKILRPDVVILVDAPEFNFRIAKIAHELGLLVCYFIPPKVWAWRTSRIHFLKKYVDCIISILPFEPKFYRQFGIEIEYVGNPLTDLVNWPRIEHIQPVEGRIGIMPGSRKKEVERLLPEFSYAAEELYTKYPQLSFYCIKAPNISTSYLKSLWFSSIPLCIETSVDRYSAMRSCEYIIAASGTATLETALVGVPTVVTYKVSSLSALVARLALKVKWVSLPNLILGKEVFPELLQENAKGSKISFILEHWMKQQNITKELQKDLHEIRKQCGEIGSVSQAARIIVQKFLSH

SEQ ID NO: 11301 - protein, 156 aa, Lawsonia intracellularis
MSRIKRLLHLLELIYWKREIYSPEIRKIFVWQTNIICVSFIIGIGTFFYSKWMIWFSIVALISLWNFYMLVKQVMKVVNKPLIASLHISFLINTTLRILITCLLGYIALVNLRAPALAVLLGFCSIIICILGINIKALFSKKQLNVFHIDCEENSN

SEQ ID NO: 11302 - protein, 233 aa, Lawsonia intracellularis
MAEQLPEPVLLSELLHMDKVTIAGQLVEFRHVFYTWIAMLILFIVGLIVRRKLTLVPGRLQNFFEVLISSFENFTVINIGEEGRKFFPVLIGIFLLIAVENLLGLIPLCDAPTANINTNIGMAIFVFLYYNYEGIKKWGFHYIHHFMGPSIVLAPFMIILECISHLARPLSLTLRLFGNIKGEEIVLLLFFLMAPLVGTIPVYFLFLLAKLLQAFIFYILTLIYLKGALESAH

SEQ ID NO: 11303 - protein, 115 aa, Lawsonia intracellularis
MFKGVIGILVTFIALGITSVACAADPVIVGHVVKLDPSSLGLAIFGCAIGMALAALGCGIGQGLGLKGACEGIARNPEASGKIQVALILGLAFIESLAIYALVINLIILFANPFV

SEQ ID NO: 11304 - protein, 211 aa, Lawsonia intracellularis
MFPLKSERIPLATIRRLALYVQVLEDIERNNTEVISSKPLAEACGVNASQLRKDLAYFGEFGVRGVGYDVTSLIKAIKVSLGVNREWKVALIGIGNLGRALLNYEEFKHRGFHIIGAYDCDPFKIGEHVYGLEVTCTTKLKENVRKQKIELGIITTPPERAQKAADSLVDAGVRGILNFVSARIQVPEHVIVEYVNFFHYLYSLAFKTSIA

SEQ ID NO: 11305 - protein, 146 aa, Lawsonia intracellularis
MAAFRFSLQQVLDYREQLSEQARVELAKVTAAVISEERKVKELQEAIHTQETNLRALDLNNIGERWLLENFIKGLQEDLRISLAQLQTLQNALKEAQGKVAQLAKEHKVLEKLKSKQAERHAKSERQKEQQNYDETASIRFNSKTF

SEQ ID NO: 11306 - protein, 250 aa, Lawsonia intracellularis
LILGTFKLLFLGSMFIFSEPQVVIVANKEEEIKENKSPDTSIKNFVTKKVESPLAYAQPTTAVNVTPPAPKVRQNTSPFSQDIQPFGDTANNLGEAYPVTIPKADPNNISTRPDEALVTPAPAPKLNPFVPKDSVQRKQEELNRREQELLSLQQQMQSRLDELHALEGKIQKMLDEANNVKDQKLTHLIDVYSNMKPKQAADVLATLDPKIAVKILSGMRGRQAGEVLTYMAPEPAAKLSEMLSRTQLPN

SEQ ID NO: 11307 - protein, 257 aa, Lawsonia intracellularis
MPRLKFTLAYVGTAYHGWQTQRRKSLPELPTIQSTLEKVIASIIGKPVRVCGAGRTDAGVHAEGQVAHVDIPESKLKLDWQLVLNASLPKNIRVVHSLYVEDTFHAQHDAVQKLYAYRLWLNHRYTPPVLYPFVWSCGRLDLEAMDKASTFLLGTHNFVSLQNRGTKLLSTVRTISALYREPSQFFSLNESHEVTWFFKADGFLKQMVRNIMGLLVLVGRRKIQPEKIPYILEAKDRRHSAPTAPAHGLTLKKVFYS

SEQ ID NO: 11308 - protein, 140 aa, Lawsonia intracellularis
MPQVAARISEQQEQWLKDYFRTKSAGAEFVLPWVVDTFFRAVTNIKNTFSNVELKAIIEAHKDFKLLPAHTRLSYLMLRVNDACDLSSVHNRYGVSRSSLEAKLKRLDDTQAAALMVWASAFWVSRNCSADNMDEYITSY

SEQ ID NO: 11309 - protein, 158 aa, Lawsonia intracellularis
MGKYRFIMHEENCINCKACENVCRTTHDTAPGLWLGKLLYTTPEGKMEAQVKFRACPQCNHAKCVSACPTGALIMRDLDGIVYVDVDKCTGCGLCLIACPHDLLWKDPRTGKIVKCDMCYERMDQGLEPSCIASCPTNALELIERKPGEPLHKIHHKK

SEQ ID NO: 11310 - protein, 291 aa, Lawsonia intracellularis
VNNKVALVLGGNTGLLGKSLVRCLQQKNWDVHTLGREDGDILQPDFLSNYIDKCSPNAIFNTIAWTQVDLAETHSNDALLINRTLPSLLGTILKGTSTHLIQFSTDFVFDGTKNVPYVEEDVPYPLSVYGSSKLAGEQAILQLKLENYSIIRTSWLFGPGRKNFIQTILELAKTKNFLHVVHDQIGSPTYTPDLAEASISLVENKGKGIFHIANSGQASWCEFAAEAIRQANLSCTIQGISTNEWGKNIAKRPAYSVLNCERYRQITGISIRPWPQALREYIFTYFLPMET

SEQ ID NO: 11311 - protein, 339 aa, Lawsonia intracellularis
MQLLITGGCGFIGTNFIQLALKELKDVYIVNLDNLTYAGNPYNLKEIETTKPDQYLFIHGDIGNATLVQSLLQSYSFDAIINFAAESHVDRSITNALPFITTNILGTQILLDAARAMNVPKFIQISTDEVYGSLGINGKFSEKTPLSPNSPYSASKASADMLVHAAYKTYGINTIITRCSNNYGPYQFPEKLIPLMIHRALMDESLPIYGDGLQVRDWIHVEDHCRGILLVLEKGRPGNIYNFGGSAEQTNLAVVKEILHLLNKPNSLIHHVKDRPGHDRRYAMDFSKAAKELGYMPQITFNKGLAATVNWYLSHRDWVQNILSGDYKEFMNRWYKDRL

SEQ ID NO: 11312 - protein, 263 aa, Lawsonia intracellularis
MKYGILLTTFGSFNLYCKVSFSNFESQVQECFPTIPIRWAFTSNALKKQNIFRDEKIGLLDEVLSKMAFEQFTHIAVQPLQVIAGMEYSGIVSKIKILGERLGFSSILVGEPLITSSIHSIERVKEAIFSVIPYKRKQTEPVIFMGHGNKSMFKDKYRTLSIAVRNNDPLVFIGTMDGSYRLEHILSALENALQTVWLMPFFTIIGKHVLEDMVGKSPNSWQSRLEAAGFSCIPILKGLLDNKAFSDIWIEHLKIVITNLYNT

SEQ ID NO: 11313 - protein, 322 aa, Lawsonia intracellularis
MYHFNKQLVLYYIVALCLYLLVNISIANARIIVVIYGGDTCITAQQACSIAIAEALLIESEEYLSHKFSEPRREAIKKYFSMVSPGLVLNTTELEPTSLEDGRIKGVFDVPIRKTALYRLLRELGLSYTTSFIQPYVLSMFNVPDEIALLDKLFLLEQVTGVVQSEKVDNTSHKIELQLSFEDGIWVAKLLGAAQPIQASGYSIDNIWREIWGAFFSQRQKETSSYLQSYLLRVSGWKHAVEVEALGKTLSHWESITKNVLLHEVSISKGVIAAQWTLTILNMDGFEKQIKQYSLARKLHYEIKPFEAIIKDNSIDIQCIGN

SEQ ID NO: 11314 - protein, 79 aa, Lawsonia intracellularis
LGLAVSKKIGNAVVRNRIKRLLRECFRLHQEYIPKSVDIVVVPKYHLRLVPITLSMVIQDIIFISNKMEKFLSTNGIEV

SEQ ID NO: 11315 - protein, 532 aa, Lawsonia intracellularis
MEDKRIVLAIILSLVVFLGWHSFAEYMGWISPKVQHVANERHSSVDQTATSNIALDSVQSVFSPPTGKDVYIETPLYIAKIHSSGGILSSFILKKYKVNLDNTSPLVNLVSPEASQAMPLGITLNGQPSWSNGNWSFLGGDLYLKPGETKELTFVGIVNGVKIIRIFTFNADSYLIHEKLQLASEKQNSCPTKVGLLVAATPFGTGQYDPTRMAWSIKDSFKEETSIDTLKEKGIQESGEFNWGGVMSNYFMNVVALSDPLYLTIKGRIQNDVWRVALERSNVLIPAEGTTSITVNWWFGPKDRELLSRAPDKLENAIDFGMFSIIAKPLLTALTFFYEYTGNWGVAIIVLTLCIKIVFWPLSQKSYNSMEQMKKLQPMMQKLREKYANDRDTLNREIMQLYKTYKVNPAGGCLPILLQIPVFIGLYQALLNSIELRHATFIYYLPFTHLVWLADLSAADPFYITPLLMGASMFLQQKLTPASGDPTQQKIMMVMPIIFTVMFLNFPAGLVIYWLFNNLLSIGQQWWMLRKA

SEQ ID NO: 11316 - protein, 337 aa, Lawsonia intracellularis
MEEFREFEERTLDEAIRAACKFFDATRERLEIELIQDAKNGIFGLVGARKALIRARLAQMQSSVDTLKQKKISSLSLSKKTKKQNRKINHHQIDQVGNVGEISTQQLKSSYNQSLNNTVVREEFPQVDNKIEREKDNEFSQLLDLSIENKGRLGPEVATLDVNEELFNDNYDGTTKNFSELDQDKLITEATNVVTKLIIPILGNVPIEVTILNNRLDVHVDCGEYSGLMIGRGGQTLASLQYLSSRILSRIMSSSIRIQFNIGDYREQQHERLRHLALSLAERVRNSGRSCSTRPMSSYHRRIIHLTLQNYPDIQTRSSGDGILKRIIIQRRRQERR

SEQ ID NO: 11317 - protein, 459 aa, Lawsonia intracellularis
MCDTIAAIATPSGTGGIGIIRISGPKSKERLTELFHSVSPKFTDFKPWMLHRGYLVAPTNEFLDDILAVYMPAPYTFTGEDVVELHCHGGHFLLLTILETVLCKNIRLAKPGEFSQRAFLNGRMDLTQAEAVAELIAASSRNEVLLASNRLKGLLGQKIIDIRRRIEELRVWICLAVDFPEEESGIFPLEKFINGLLEIHEIIQKLIHAAERSRCWKEGVTVALAGAVNAGKSSLLNALLGKERAIVTEHPGTTRDFLEECIIVNSLSIRLIDTAGLRVTSDPIEEQGIQKGREKIDEADVILFIIDGTVGVTEESKLLINNFGVERTILVWNKVDLKVPPSNWTELYTSSQVSGICVSAKTGSGIEELLVLLYNFVLSQHNAQEPTFDTIVPNMRQVEVFSLVLEEIRSLYEDIRSGIPYDLCAVMLENISSMLNSIIGFDTPEEVLNRIFASFCIGK

SEQ ID NO: 11318 - protein, 198 aa, Lawsonia intracellularis
MNEESVYNGKSVSKEDINILPIITYKGNIKVVQTENELRDALDLLKDETVLGFDTEARPSFKKGKSYPTALVQLASSQHVILIRLSKVPLGELLVNILSCAKIIKAGVAIHEDIRLLQKLHPFEAEGIIDIAEMARRLQLKAQGLRTLAANILGCRVSKAVQCSNWEKKELSPQQVLYAATDAWVGRELYFKLLEMGA

SEQ ID NO: 11319 - protein, 979 aa, Lawsonia intracellularis
MQGPPFLIIPWERDFLECLSSIIIKETDGHLDKAAVIFMHDRPRRYLTAYFQQHPELSKPCILPYILTIQELLSCLYLEQHTSLCYEAGLLDQVDLLFSCVEQLSALNVSLFNLLSKGGEVGFFPWGLQLASVFEECFTQGLKPRDLLYTEGEVAPFGTALLASLGQIFLLYKQKLEQEGMTTPALKAYVLAEQIRQSTFDLPSFLKQKSIFLAGFSTLTGTENIIFRYLWEKGAKICLHVDSSLADTGKGHWACSSQAKWIQSWNASTELVFQTKPVKKTWHFFAGYDLHSQLEKLQDDFSLHEDIQTSTAIVLTNSKSLLPILHHLPHKNCNISLGYPLNKSLLFRLLENIFKIRELQQEDGTIYWKSLLHLIRHPYLRFLKIDGFELYSLLHKLEQWIVNGQKYIDLNMFFREVEYEQPHKKYDFSESECLLLKQLIKVTVENCITIDTLAKFADFLSILCDFLLQFGYESWQRFPLDAECLFRLVHKVIPALKDNRMAHTVLSWDLLQSMVVALIHDERVPFEADPITGLQVLGMLETRLLHFSKVFLIDVTDDQLPGNPIRSSLLPDSLRKILGLPNAHDRDVLTAYTFYRLLAGAKEVYLYWQEGIEVSNSFEGKKQKSRFVEEILWEEEQSIGSQITPGDYILNIAKPEVSPPLRRRRHIIKTPAIQRQLNSILSHPVSATQLDTYLMCPLRFYFERVAMVRPVEVVNEDDDPASVGQLLHKVLKVFFMDYVGKECIKEDLSNERLRMLFKEELLSSGLINSLPPESSMMLSLSGPEKLVRFLSRQPDKTKIIYLEKYFQATLQINGNTRVLEGILDRVDKRGNEGVIIFDYKTGRIKNNSDKLWQDESIWSNLESFDLTSCIEHPEKADELLFTLSEKISTIQLLYYIYLYRDATGEEIQDAAFISLGEDGAEYWLMRDLAANIKEDIILNKIPKLLKFLLYHMEYRLEIRPHEGRHCNWCSWNNLCKVNG

SEQ ID NO: 11320 - protein, 376 aa, Lawsonia intracellularis
MSFPSLKIGELCARVPIIQGGMGVGISLSKLASAVAKEGGIGVVASAMIGMREPDVAKNPIEANLRALRREIQKAKEATKGIIGVNIMVALTTFVEMVRTSIEEKADVIFSGAGLPLELPKILLELCEQKKEEFKTKLVPIIASGRAATLIAKRWLSRYGYFPDAFVVEGPKAGGHLGFHEKNLFDPNYALEQLVPGVVEAVKPFEDQRGQAIPVIAAGGVFTGEDIARYLELGASGVQMGTRFVATHECDADDRFKQAYVQAKEEDVTIIKSPVGMPGRALFNTFIDSMRKGKKRPFKCIFKCVKTCEHETTPYCIATALISAMRGNLERGFAFAGANVPRIDKIISVKELITTLQQEFDAFIQSIVPKSQPTVE

SEQ ID NO: 11321 - protein, 327 aa, Lawsonia intracellularis
VHILAADIGGTYSRFALFKDNPLCLIHKEYISSYTTSFTTILQQIMSNSLFASVPLDMCVLAIAGPIDNQEIVKPSNLPYSIIKKDLLSFCKNILFINDFEAQAWSCLTESMSDAVLLHPEPKHNSFHNNNNVFSFNNKSGRLGVIGAGTGLGMAVLELDMYGKTKVIASEGGHSAFPFITNHELEFGNFLCQKKKLNYARLDDVLSGSGLTWLHLFLTKEQFKPEEITLKPEFIDSETHTYFSCFYARICRSLALFSLTQQGIVITGGLAKKCQILVNHPSFKKEFVNIGGEHKKILSRMPIWLNCNDASGLWGAAQAGVIYSSKN

SEQ ID NO: 11322 - protein, 259 aa, Lawsonia intracellularis
MIEGISSSSISFSGCSGCSVHSDSQKSKKENTNTPIQNNLSKEKDTDATGLRLTPEQKKEVEELKKRDQEVRTHEQAHMTAGGDLTSPASYTTTKGPDNKSYATGGEVQINVSPEEGNPEKTIEKARKIRSAALAPANPSSQDMQVASQANQMEAQAKIEKNSIENAENGKNKLSEKNTITTKKQEKKSINKIGNFSVNESLIGFLASPFMFSSAKNTTIDGNMIGAHLPPSQKAVASLYSYNDKLAQETLPSSLSLMI

SEQ ID NO: 11323 - protein, 580 aa, Lawsonia intracellularis
MLIKTTMKEYQPKLSWRTIGIFFLLILLATFIIGKSGKQSQNIVLQLFLDKGSTLINSIAHLTKDDTIGYNKGFQIQLVIDKLVRQKDVYFIVVTTQEKIFFAHSSDSNFPLNRSEINTLVDMASATVIPGDGIMWNFLQLNNNNAFVVYSRSPGIVSDSPVNVTQGNFKDGSFIFIGFNPELFLEVQDADKEQSLLSICTILFFCLLLLLSFIFFRNFGYIQKTYNVINALTEYVVLTSKDGLMLLDSAGAVLQMNPAAAQFFHISNPIIGSWVYLSNKKHDELFPPIFYDVIKQVIEQGKLEETELFLSLAGEEHYIIVQGNSLDTFKKGQPEYLLSFRDITKIRLLEKDLYQKDTLASIGSLASGVAHEIRSPLSSIKGYVNYLGDRLPYDSSDQELIKIIMQEIDRLNRVISDLIGLSVPTDVYPEYIDLQKVIEDTLRLVKLDAKRHSVELLFYRNEELPFVPLDPDRIRQVLLNLCLNALDAMPDGGSLKIIFDVNKNTQQFFLEVIDTGMGINEEVLPRIFDPYFTTKLKGTGLGLSTVRKIVEAHKGTILVSSELGKGTIFRLVFPLKLNEL

SEQ ID NO: 11324 - protein, 471 aa, Lawsonia intracellularis
MMKPIILIVDDDDVHRSMLSALLKGWGYETDEASDGDIAITKAKEHAYDTILSDLKMARVDGIKMLECILNYNPSIPIIIMTAWSSVETAVQALRMGAYDYLTKPLDFDALKKTLQKALTHLQVHPIVRDNESFHKVNTKIEQSNLGILGRSPCMLELIQMVSTVAPSEATILIVGESGTGKELVARAIRQASHRSDAPFVTVNCAALSPALLESELFGHEKGAFTGADRRREGRFKQADGGTLFLDEIGELPLLLQAKLLRAIQQGEIQRVGSDTPITVNVRVIAATNRDLPEEVIAGRFREDLYYRLNVIGIEVPPLRNRIEDIPLLATFFLEKFALSNRKVIKGFTPQSMDVLLRYNWPGNVRELENAIERAVILTTGDYISERELPMVMTSPSQPNVLSSQSDKEIVQYKDTVKHLSQEQTLTLEELEKRAIINMLHETSENKSEAARRLGITRATLHNKLKRYGIE

SEQ ID NO: 11325 - protein, 138 aa, Lawsonia intracellularis
MSEVLYEFYTGLTMTQGNDSALSSKSPLKAFSNQTIDWDLSPEKAVTLHLEYGNNNWHVIHTGGCSGHDSSVYFIVDTYSDPIQVRLIRRNFEMAEHLISIPLPDTLVKLFQKEYGNIRGVFEPLPEIKEWLRTELGQ

SEQ ID NO: 11326 - protein, 327 aa, Lawsonia intracellularis
MQQQYLVKQTEYLLQVTDLSVQFNLDTPITILQHIQFCLNKGKTLCLVGESGCGKTMTALALLKLLPEYGRIISGQILFNNKELTQLSEAEIREKRGKDIGMIFQEPMTSLNPVIRVGDQIAEPLIQHLHFSKKDALHKAIELLKIVGISSPEKRILDYPHQLSGGIRQRIMIAMALSCSPSLLIADEPTTALDVTIQRQLLVLLRQLIEKHQMSMLLITHNLGVVAEMADEVCVMYAGEVIENASVYDLFKKPAHPYTQALMNAIPLLKKGKLRLESIPGTVPALGKLPIGCNFRPRCPLAHERCIIKPPSTYIGNNHNVSCWLYN

SEQ ID NO: 11327 - protein, 112 aa, Lawsonia intracellularis
MSAVVDSMTPFPCSEHDELPVINEATACCVFDKVESYISLRDLKVGQHARVVRVQADGELGRRIRDMGLVPGTEVTIVGRAPLKDPVALRLLGFTLSLRNSEADYVMVSPIS

SEQ ID NO: 11328 - protein, 733 aa, Lawsonia intracellularis
MVILQKQTFALAGNPNSGKSTLFNTITGSHQHVGNYPGITVEQKEGFLHTDTDEILRIIDLPGTYSLTAYTEEEKVARMVLLNEHPDVVINVLNANALERNLYLTVQLLEMGMPLVLALNMMDEVESHGLSINIKKLSSKMGLPVVPTVARTGKGCKRLILEACHLADARRGVEKKPLLISYGPDLDPVIKFMEEKIQEAEFTIKNTPARWIALKFLEMDEELIEKTRQLNLNLSKQLEEKVAEVTAHLHATFDTCPEAVIADYRYGYISAVLREGVLTQQDPVRYRIKLSDKLDTVLTHKFFGPVFMFFILYAIYHFTFTLGAIPMGWVASLFSFLRTQAGLLLPSGLLKSLVISGIIDGVGGVMSFIPLILLIFLQIAVLEDSGYMARMAYMLDRVFRFFGLHGCSVVPFIIGGGIAGGCAVPGVLAARTLRSPREKLATLLVIPFMSCGAKLPVFILFAGVFFPGHEASIMFGLTLAGWGIALLTAKLFRSTIIRGPSTPFVMELPPYRLPLLKGLFIHTYERTWSYLKKAGTTILLISILFWAAMTYPELSKDRLAIYSKKEEVIQTEIKLTQAKGGDISSLQDSLQDVKKQVGEESLRNSLAGRVGLFLEPITEIAGFNWQMDIALLGGFVAKEIIIATLGTAYSLGDVDPQDAKPLAEQLHQDKSWTLASALALLVFVLLYAPCLVTLVTIRQETGSWGWPIFSMIFNTLLAFILAVIVRYVSLLFL

SEQ ID NO: 11329 - protein, 404 aa, Lawsonia intracellularis
MNPLESIDSCITCSICTINCPVIAATKKFKGPKLTGPSAERFRLKQQKEIEGLSYCSNCKCCDISCPSNVKISSLNMLARAEYYRTRRPPFRDWLLAHAPFLAKLIKWIPYQLQLIGMKSPITRWLLDKIGIDRRASIPFFAPTYFPKLYSKYKKKQKGHYTKKVVFFPGCYINYYEPQTGMDFVAIMEKANYEVILPKVRCCNLPLISNGYYSEGKKVAHHNSKILQQYAEQNIPIVTMCPSCALTLKQEYAELFPEMIDQVTSFSRNIEDACEFIIKLIESKELQINVTLHSTKLLYHTACHLKAQGIGKPGFELLQRLPGANIEDAEAGCCGISGSYGFKKDKYDIATSIGNNLFDIIKKSGALFTLSECGTCRLQMYHHTGVEALHPLTLLHRILKQTPQ

SEQ ID NO: 11330 - protein, 417 aa, Lawsonia intracellularis
MNRKVDLIVVGGGLSGMTAAAFAARKGKKCILITKGNGTITIGSGTIDVLGYLPNGKPVSNPFEAVTFLPKRHPYQLIGELTVRNALKNFSELVGEENVIYKTRSQKNTYVVTAAGTIKPTWMVTESMDMSIIPDIKNICILGIEGMKDFYPELIIKGLSSKKYFANKTFTQAKLHFPESERNISTFNVAQYLETENGLKWLVQGIKQQGNQSDLIILPPILGTTFLPHLLHKLEQKSNCLIRECDVLPPTITGYRLNILLRYILKKYHVTIIDNAAVTSAEVKDNHCISVITTQNSNIRKYEATHFIIATGGIISNGILTKHNRAWEPIFNIDLPANPSSPDWANKELYPKIKKSHLFSMIGPTVDSFLRPTDSDGNPICDNVFFIGNTLNGYDSAYEKSGNGVAISTAYFASLNV

SEQ ID NO: 11331 - protein, 542 aa, Lawsonia intracellularis
MKALSFYKNQHWDVIVIGGGATGVGTLRDLSMRGLKTLLLEQQDLAYGTTSRFHGLLHSGARYVMKDQGVATDCAKENIILSKICKPCIENIGGLFIRTNEDDPEFEKNWVTACNNCKIKTTPISITDALKEAPTLSKHILSAYKVPDASIDGFKLVWHNVISAQKYGGEFRTYTKVTSITNSNGVVTGVTIEDFWTKEITHLTCNFVINAAGSWCGDVAAKAGIELHLTPNKGALIVFNHRLSKKIINRLHPPSDGDIFVPHESTTILGTTSKNTNRPDDIIPEQSDILELLNIGSVLFPKIHQYRILRSFAGTRPLYSMYKSPKELYASRSFRIIDHKNEGLSGMASICGGKVTTYRLMAEQISNVVCNYFNNNVPCNTAKEPLITEVDPTLHKKIKYFPIQGFEPALSRLGNSINEVSTAIKNNLLKKDLICECEMVTFAEVEYIASQPSSYLLGDISRRTRMGMGTCQGTFCALRAIGNFLQFNLLSSKEPITDLLQTFQQKKWVGIYPSLWGESLREVELFRQIYSATLNIEQENHE

SEQ ID NO: 11332 - protein, 198 aa, Lawsonia intracellularis
MRESFIVLACFLLGIIIGHIELVPKELIYEGLATCIVYFMLFTVGMTIGINSQAWQVIRSLKGKILLVPLGILIGTLLGAVISWLILQNIFLRDVIAVASGLGYYSLSSMLVTQFTTPDLGALTLLVNIAREIIAMTFAPLFVRLVGGLGPLSVAAASSELCIPIIARTSGELNTILAIFSGAVLTICVPIIITLLYK

SEQ ID NO: 11333 - protein, 102 aa, Lawsonia intracellularis
MVAEIVCISLGAPIGFLIRNHPRLIKTVDYSLIWSVRILLFLLGLSLGSNTTIIQQLDTLGIQAIIITFFCIAGSLIAAKLLSRFVHIIPENIQEHLKEHLK

SEQ ID NO: 11334 - protein, 217 aa, Lawsonia intracellularis
MEQVMALEQTWTLHRPEDFKVRWKEFVLEYFKVGEYKNPPYWLNFWPSNYFLIEWLFHHKEDIAGELCIDLGCGLGFSAVIGQWLGAKVIGVEYVFEALTYAKYNAASNNISQPYWINMDWDKPAIVKNSIPYIWCSDIIYDTNDAEPIICFFDNMLKEDGIIWISEPKRPAYDVVLNKLEKRGWNCKCMFESEIPHCRPLPKFKRIYTRMWEISRG

SEQ ID NO: 11335 - protein, 139 aa, Lawsonia intracellularis
MGETVRFGVSLDEDLLNKFDKLCDRQGYPSRSEALRDMIRQALAKDILQSKDSNAAGVLSLVYDHHTRELSRKLIERQHEMYDSIIATLHIHLDRYNCLEVLIIKGNGGKIQQLADMLCSIRGVKLGAFSFLPVEEDVF

SEQ ID NO: 11336 - protein, 258 aa, Lawsonia intracellularis
MKDIQSTPAQIAFPIDRVGVKGLKFPIQIQTRDIGMQHTVAIVDMGVDLSVSSRGTHMSRFVEVLQDWNEPLCCESLERLVKQTQKKLQSQHAYIAFFFPYFLHKRAPSTNMLSLFSYDCKLSAKSINYNIEFILELTVPVMTVCPCSKAISHEGAHSQRSEIYIQLRLEQFRFIEDFIVLAESSASSPLYSLLKRADEKYVTEDAFAHPKFVEDVVRNISSKLITVTDVLGFRVEVESFESIHAHNAFAYIEHEFIC

SEQ ID NO: 11337 - protein, 349 aa, Lawsonia intracellularis
MEIVSNGIIGESTTLKEVFHVLHKVAPTDSTVLVTGESGTGKELLVRALHAQSLRVTKPFVPINCGAIPKELLESELFGHEKGAFTHAVRSRAGRFEVADGGTVFLDEIGEMDLSLQVKILRVLQEKEIERVGGTGPRKVDVRIVAATNRNLEQEVEQGRFREDLYYRLNVIPLHLPPLRERGRDILLLTESFLTRFCARKQRPILKIDPEVSKVFLAYHWPGNVRELENVIERLSILVDGNIVRLHDLPRKIIDSVGTLEDLTNIELPKSVESIPTSISPQEFIWPRLEDMRTRGVGLKEFLEQIEDRLLGEALLLSDGVKNQAAEILGIKRTTLIEKLKKRRLDGEV

SEQ ID NO: 11338 - protein, 1076 aa, Lawsonia intracellularis
VKFFIYSWLFQFFLITGGMILFTVEYVEAVSWKWSMLPGRERIIISYDTPNQGKKASRISTTQLEIPLSTPAKDLSRIGASPSPESLVSDLSLDGSKLHINLRDAAFGYITTSTNPNQLIIDVFSDPLGNRWRNLGVPAPASAPSRASSALPEVPKNISKQIKVSNNGQRLNKDQEKTSLSQEQKQVAKAPAESITSEGKAEKKQSIKADTSKDNVKKSQDVKGTLPVDTKDKQQVSKKENQEAISKEEKIETVPTVPPPSVDELTMLTAKVEKSQLASDEYSWSKKAKSPAQEDNTEEKLEKSQNNNNQKVNILENSSSSTEGTVQSKLTETPIVEAPIEETVNSIHSKLNFKGPDAWPKEKALSTLDKLEEVLNKNKLMQQPETRDSLQPLSKTNEEKPVSEPVVVYVDEKGNPVGKPPDTTAIIEEAKKNMRAGQVQKAKDLLATLKGHALVQEQHEEVLYLFSELNEKIYKDRWIEGYEPIITSTNKAMNFNLRSPRVAEALMRLGMVNLRIGNQDEAAGYFGALRRKFPQSEFIPEAYLALGKDQFSKGEYADAVKTFQLILDNYPESKAVQDASRFMAEALFKQGHYSRALILVDFVDRRWPRLYLEDPNYLKMVGDLYSRENRLDDALKAYWTYYNLVPEAKDSHDTLFKIGTSYFKKGLMQGGKDVFEELLKKFPKSDSAPKALLALGEEQVIKENPTIQELVTIFENPSSTIPEIYYKKILDEYPNSPEAQQAAIRLAAWKLWHRDIPTAMTMAQQFLDKYPESPYAPRAEEIIARGFDQSFALALQEENYERILSLWEKYPYLQIAYKDMTDELRVALARAYLNRGDEEKGMDLLNQFLESPQDPNYGDYVYNLYLAHYLRKEDWTNILKLGEKVSSWKFPVSARAQLDYALAIASENLGLGNKALPLWERLYQREDIPLYQKAYANYFMARDAERRRDLNAAYKLNLNTLKLFVTLQEERSDKADPERVRESLAALMDVTEVANRFVESLEWADQYAAFVPETSPDYAGLLFRKARLYRKMGDLSKWKQLLDEIVRREPESVFGRMAASELRTYEVSRDLSRFTQ

SEQ ID NO: 11339 - protein, 347 aa, Lawsonia intracellularis
MVSSRQSKATVPENIAEEYYQISHEILSSFPKYRPPVDLFQFREDILKLYPYSRKGCRLTNEQIEEIQILCNEGRLFVSRTDHPIYSEHIVKQVDLVLLDSNLKEAEAADIFIRALDMRLLDFIGQPVLPVFEKLYNDLMVFTEFLWQDKHRIKLFMRRLYTEHTLSHHSLNTLFIGLWLLQTTHEDKLIRREWDRSALGLILHDIGMSKIPSFILEKATPLKSEEKEKILLHTLAGVKILQKLNLGFNEITQAVMEHQERLDGSGYPNKLKETHLSKFGKLCAVADSFAAMISNRPYAQAIPPKAAAQLLANDKERYDSTFTVPLLNAYLTGALESKLRQEHSNNA

SEQ ID NO: 11340 - protein, 471 aa, Lawsonia intracellularis
MKTKIIATIGPASNSKETLSQLIQAGVSIFRLNFSHGDSSAFIELISTIRELEHIHQIPITIMQDLSGPKIRIGALPGDVALNVSKGDVLCLGPEDKRTNDYPYIPFDHKAILSDLVVNDILILADGTLQFQVKEQNSNGTFLLIAQEDGIITSRKGLALPGKSIKVPAITEKDQKDLSDGLKLGVDAVAISFVQSAEDIIEAKRIIKANGYDIPVIAKLERRNAIEHLEEILKEVDIIMVARGDLGIECPLPELPAIQKRIIRACNKASKPVIVATQMLLSMVSNPTPTRAEITDVANAVLDGADCVMLSEETAMGNHPVETVGFMRDITTKAEELMIETRHLKEPEAEKSAEEFLAYAACLLAEKSLAKAIVTHTMTGTAARHVSTCRPSQPIYALTPSRTSLKGLNFSWGVLPQYLSASSEGDLLRTENFIMQNPTFAIGEDIIITAGQSAPHTVQPRGTNFIKIFRK

SEQ ID NO: 11341 - protein, 149 aa, Lawsonia intracellularis
MQFRGQSYRNIDSKGRVILPPGYRETLEEYSSEGSFVLTTYDNCIVGYPEPQWKEIEEKFSKLRNSSKKLRDFRRLFLGGAEKQSLDLQGRVRISRAHIEYAKLDHEIVVLGQGEHFEIWDQNRFKAVLEQDFDDVADELVESGIDFPL

SEQ ID NO: 11342 - protein, 312 aa, Lawsonia intracellularis
MHQPVMLEETIAMLKPHAKGRYLDGTVGLGGHSFAILQSAGDGAELCGLDQDKKALAIAEMTLKPFKKRVHLVHTKYSSFPLILKALGWKLLDGALIDIGVSSLQLDNAERGFSFLYDGPLDMRMDQDANNNSLFEIVNKSRQEYLKDIISRYGEEPQANRIAKAIVQKRRTKPITTTKELADLIEQAYPAAWRAKSRHHPATKTFQAFRIVVNSELNELEKFLNMIMGWIAPGGRVAVISFHSLEDRIVKQYMKSWTRSCICPPYVPVCKCFHKPEAILITKKPIRPSEKEISENIRSRSAKLRVAEKVLL

SEQ ID NO: 11343 - protein, 693 aa, Lawsonia intracellularis
MSYLGLSHRQNKYHKFTWTTSRKKVRGKYFSFRIDKWNAFRFQIVAILFCIVWCGLWCRSAYIQLWKGTFFSEKARRQHIALETVSTPRGNIVDRNGRILAKSIQCYSVYADPFSIKDIESTAIKLSNCLHLSEETIRKLLQKQNRFVWISRHIDDATAIAINQMKIPGVMLLKEYERVYPYKHVAGQLLGFVGVDGNGLEGLEHSFNDYLSSFSTKQLVMRDASGRRFYINNGEELHNSTRELQLTIDLQIQSIAEDAIAQAVSEVGAKWGGVLIVDVKSSEILAWSQYPFFNPNAYRQYKPSEYRNRLALDAFEPGSTFKPFLIAAALQEGIVTKDTLFNCEGGVWKIKNVVIRDDGTPQKELSVTKILSHSSNIGCGKISLELGSQKFYYYLTKLGFGQPTGLNIIENKGILRRPREWSEADLISTAFGQSLSTNALQLTQGFLTIATHGIYKPISLFKTPLKKVSEQRIFSEDISSEVLTMMRQVVESGTGKRAAISGVSIAGKTGTAQKVDKTGKYGQERIASFVGLFPAEDPHYLIMVVIDEPITKKYGGVIAAPVFRKIATKVMAYVGSPESLQYQVVTKEEEKISSNKVSSLVRTNKKEKSCSNTLEVRQKIDRKDPIEYATSLKIPDVVGKSIRKAIELFAGQGLVPEVKGNGIVVIKQEPEAGTHLIKQHLLDKKCILWVSEK

SEQ ID NO: 11344 - protein, 482 aa, Lawsonia intracellularis
MNRYPLKALESELEKKHMLICIDSRKVEKGCVFVALPGSSVDGGLFIPDAVSRGAAYIVCRHNEVEYCGSAIPIVVDDPRYTLGRLARIFYNTGNLSMPIIGVTGTNGKTTITYLLEYLFRAKGNRTGVIGTIAYRWPGFSKEAPLTTPQCLDLHAMLAQMQVDKTEIVFMEVSSHALDQRRIAGISFKGVIFTNLTQDHLDYHKDMKEYFHAKARLFFEYPSKNKIMVASMDNQWGRKLAKLVPEIIGFGFKNKPTQVSNYLFGKILSSSRAGLHLQMSFKDKVWELCTPLVGVHNAENLLAVQAISLQLGLAPEDFCCFEKFTGVPGRLERIVNKKQLDIFVDYAHTPDALINVLSALRDVGFKRIITVFGCGGNRDKAKRPLMGKAVAKLSDVAVLTSDNPRNEDPELIMADVLPGLKKAKQIITEPDREKAIRQAIELVSPGDALLVAGKGHECTQQIGFMKYPFSDQSVIRKILGCD

SEQ ID NO: 11345 - protein, 464 aa, Lawsonia intracellularis
MRLSLDTILSVTGGTLVAPTTGYNSYIDGVSIDSRAITTNSLFICISGNITDGHNFVLKAVEEGASAILASHNPFEGEVPVPVILVPDTLNGLKVLAQAARKMTKAKVIGITGTAGKTTVKELVAQLLTSKGKVAKNYLNFNTQIGMSFSILAAQGDEDFWVMEVGISNPQDMEELGTILTPDIALIINVGPGHLSGLNKQGVAYHKAQLLRYMKDEGLGIVSLDYPDLVKEVKELRSGSLFFSVLDNQCRYYSKYTGIVENGYGTYRLWLDDDIVDVTSPFLGNFGMESVLASATIAHKLGVSSDSIKQQLFQAILPQNRFSCFTHGNWLCIDDSYNANPLSMNAVIESTYKLSDEKKPLVYVLGEMLELGDSSEAEHEKIGKKLAQTGASIIFWKGGMIDNVLIGLKGGGFKGILEKISTEQEFQSLFLKHRLDEGIIVFKGSRSNKMEVFVDVFMKLVGTK

SEQ ID NO: 11346 - protein, 358 aa, Lawsonia intracellularis
MLYNILFPLSSDYTILNVFKYITFRSVWSLITALILSILLGPYFIRWLQRINFKQQIHEDVKIHKSKTGTPTMGGVLICFSSLCSTILWSDLTNIYVWLTLLVFIGFSFIGFLDDYIKILHHQNKGFSAKVKLLAQVVVAGIAMLFLVSEPAYSTKLAFPFFKSLHPDFGYFYVPFAILVMVGASNAVNLTDGLDGLAIAPVIVSIFVLSVYIYVTGNVKFSQYLQVDYIAGVGEVAVFCGALIGAGLGFLWFNAYPAQIFMGDVGSLGLGGVLGFLAVLCKQELLLLIVGALFVLETLSVIVQVGYFKWTGGKRIFRMAPLHHHFELKGIPESKIIIRFWIISITFGLIALSALKLR

SEQ ID NO: 11347 - protein, 440 aa, Lawsonia intracellularis
MLSIANNCCISLAQNEWPLYKVAVVGTGRSGMAAARLLHSLGASIRIVDKTRENVSKTFMDWIKQTNCEVMFGEHCPKQFEDIDIVIPSPGVPLNLLKPHFLNTIQVLSETELAWYQLSNEKVIAITGTNGKTTIASLCAAMLVEQGISVFVGGNIGTPLSEYVLCKKKVSVVVLELSSFQLQTCSLFRPDIAICSNISINHLDYHRNMDEYISAKLNICKNQCESDLAILKPGMEALVDSYNLKARVVFYRDLGNFSTSRLLGVHNLENAEAAWLACKELGVTEEIAKKVVTTFEPLEHRLEQVRLLNGVLYVNDSKGTTVEALRAALESFKQPILLLAGGRFKGGDLTSLRPIIKKQVRIVGLFGNSREYFEDAWGDIIPITWDNTLEQAVKRLSNLAHNGEVILLAPATSSFDQYMNYIERGNDFKRIVHEVLNEHC

SEQ ID NO: 11348 - protein, 382 aa, Lawsonia intracellularis
MSIVRQHRRLSGSNRHKDDISDIASYDWLLLTVVLILLCIGLIMVLSASGMVAERLTGDKYYFFKRQCLFTIISGILLWVMAVIPRSLIYKLQYPFLFVIIGLLFLTITPLGAKVNGARRWISLGLFSIQPLEFTKIALALYLAYFMSTKQELVKTFSKGVIPPFAVTLILAIMLLVQPDFGGAMILIMILFFMCLVGGTRFIYLFLSIAMSCTIAAALVWHSPYRARRLAAFLNPFQDAQNTGYQLIQSLYALGSGGFWGAGIGGSNQKMFYLPEAHNDFIMSVIGEELGFLGITIVMALLFLFFVRSYLIVVKQRELRDRLSAFAVTLVIALGCILNLAVIMGMAPPKGVAMPFLSYGGSSLLATMCCVGLLLNFSRIGR

SEQ ID NO: 11349 - protein, 363 aa, Lawsonia intracellularis
MKYRIAITTGGTGGHVYPALAVAEQFHDKADLFFIGSQYGPEAEMVKTFNIPFYGLPVRGVLGRKWKAFSALYSMIKAIVKARKILQKCMPDIVVGFGSYASFAPLVAAKLKRIPTAIHEQNVRPGLANRMLARLADRVFLSVPDTLHIFTKKSKVRYTGNPIRQSIVDLHYKFEDTKNSSTRHLLVLGGSLGAIAINSIVVDGLSRLFSNRIVIRHQTGVHDWERVKEGYALYGRTNSQVTPFIDDMAEAYQWSDLVLCRAGATTIAELAAVGKPSILIPFPYATHDHQTYNAQFLVRVGAAVLIPEKNVVEVDVIEKIIALFNDRVTLVNMALAAHKHGRIDAATCVANEIIDLLSANAMK

SEQ ID NO: 11350 - protein, 453 aa, Lawsonia intracellularis
MNSKIKSIYMVGIGGSGMSGIAEILLNLGYEVHGSDIMESHIIHRLRKLGAIISIGHQAENLGDISVVVKSSAVTEDNPEIQLARQHGIPVIPRAEMLTELMRLRKGVAIAGTHGKTTTTSLTATVFDTAGFDPTVVIGGVLNAYGANARLGQGQYLIAEADESDGSFLLLLPIINVVTNIDLDHLDYYRSFEEIEHAFVTFMNNVPFYGMNVVCGDDPGVQRVLPRVNRQVITYGFESSNHIWAEIIECGIINRFKVIAHGECLGEVILTQPGKHNILNALAAIGVALEVGISPKCCIEGLANFKGVGRRFEYKGEKNGITVIDDYGHHPIEVAATLETARKVFPDRRIVVAFQPHRFSRTQALFGEFCQVLSTVDKLLLTEIYPALEKPIPGINSQNLAQGIQQISKIDVTYYPDIDAVFHALPHVLCAGDVLITLGAGTITTIGPKFLTC

SEQ ID NO: 11351 - protein, 296 aa, Lawsonia intracellularis
MLQITTSPDLSTLTTLRLGGNAIALIDVFEKKALEQLPHQIYKIGGKPHILGGGSNILASDGSLPFVLIRSKILHDPIVTYIDEQGVVFVKVCAAMGLARFLAWCCKEGLSGMENLAGIPGTIGGAVAGNAGSYGLSIGECIYELEIFSFNNGMKILKNDEIQYAYRKFSIDEEPGEFIIITATVKLKYKQKQQIIEVIRENVAKKTSVQPVQARSAGCIFKNPNDGLSAGKLLEQVGFKGKGKDGIGFSSIHANFLINEGSKNSKIAFELVQDAKQEVQKSFNIILQTEVKVWSC

SEQ ID NO: 11352 - protein, 275 aa, Lawsonia intracellularis
MLKDKRRYKANNYNSRIASYPSLHISNENIRFGSIVTWSCWCFIGIIALILFYFSGLHLYRLITTSNFFCIERINIYGASFFHRSDILKYTNLQTGINSFSVNIGKIEKILSSNPWVEKVSVKRRLPGIFDIFIKEYEPSFWILKDDIIYYADSVGRIITPLDTDNFKSLPTLEVMEGGEKFLPILKDLIVFLESSNSIIDVGTISSVRLSSASGIEILLENYDIVLSFEPQAWKENLQKLCLVLSDLACRGELKQTRSVTAVATGVWVSQEKNF

SEQ ID NO: 11353 - protein, 410 aa, Lawsonia intracellularis
MPQSELIVGLDIGTTKICAVVGELSGDGSVDVIGIGTSPSNGLRKGVVVNIEQTVQSIKKALEEAELMAGCEIRSVYAGIAGSHIKGFNSHGVIAVKGGEVSQRDIDRALDAAKAVAIPLDREVIHTLPQEYIIDDQRGIIDPLGMAGVRLEVKVHIVTGAVTSAQNIVRSCHKSGLDVSDIVLEPLASSKSVLTEEEREIGVALIDLGGGTSDIAIFANDSTKYTGVLPLGGQNLTNDIAFGLRTPVAAAEKIKIKYGCVLADIIQSDEYIEVPSVGGREPRRLSRQVLAEICEPRMEEILTLIDQEIVRSGFKNMIGAGVVLTGGTALIQGCQELGEQIFNLPTRIGYPRNVGGLKDMVNSPKFATAMGLLHFGAEKEGMEQRFRIRTEHTIFNSILSRMRKWFAEIS

SEQ ID NO: 11354 - protein, 460 aa, Lawsonia intracellularis
MEMLFDTMVPQAKIKVIGVGGGGGNAVQNMIESSLRGVTFICANTDAQALARSKADIKLQIGEKLTKGLGAGAEPAVGRDAALESIGVIKEAIGESDMVFVTAGMGGGTGTGAAPIVAQAAKEMGALTVGVVTKPFVFEGHKRSRSADYGISQLREYVDSLITIPNDRLLTIAPKNAKLTDMLKCADDVLYSAVRGISDLITVPGIINVDFADVRTIMSVSGLAMMGTGFASGEGRAIEAARRAITSPLLEDVSITGAKAILINITATTELGIDEYSDAANYIHEAAQGSGDTNIIIGTAFDEEAGDEIRITVIATGIESQVGVKMQGSTSSKAAMPSFRKSSHITNTTSFKPEAIKHNLASEKPRYRTPRLLTNPIEMDYKTQGDHSEIFTEDTGVNYSIPTYLRALLGKQGAQSSKEEYDRTHHGDNNKKDTHNPGHENFVFDGNEQDIPIFIQKQAN

SEQ ID NO: 11355 - protein, 159 aa, Lawsonia intracellularis
MYLEIERKFLVIGDDWKCNNSAVLFKQGYIQTSPCVVRVRIEGVKSYLTIKKQIEGISRCEFEYPIPMDDALYLLNNLCKKPFISKHRYTVFYEGIQWVIDEFLDENKGLIIAEVELKIKDQSIILPSWVGQEVSNDPRYYNSNLVQFPFSQWSLSEKS

SEQ ID NO: 11356 - protein, 260 aa, Lawsonia intracellularis
MKFKFLYSIINTIRYEKRCTLCHIPFVQTNHSIKIQQPKINNSLNKKKKLCLQCRYLLQPRTKGYCPSCGELNKDKQSPITPCNNCLKNPPSWEHFYFLNAYEGEYKKLLIQSKFKGNPSITQLLGILLAECCLKLPTPDAIIPMPLHPSRLHKRGFNQCQELARPVSYALKRPLRHDLLSRVIPTSHQTGLSQTQRLLNIKNAFQADPGVKGLRILLIDDIMTTGTTLQQATKALLKQHTQAIDVCIIARTPSLSLKKV

SEQ ID NO: 11357 - protein, 198 aa, Lawsonia intracellularis
MSNIILLTCSPRANGNTDSIGAALFKELNDVLLPIEIIPLRSLSIRPCISCGFCITHPDQCFLEANDEVGWLFDKIRAASTLIIASPIFFYGPPAQLKSFIDRSQKYWNNSNYTLYEPIPNNPFLKPAFVTLIAARNKGERVFEATLLILKCFFQCIGFSLCDTLLLRDLDGPHDFSHSNEAQAQVSSFAKIIQSKLS

SEQ ID NO: 11358 - protein, 300 aa, Lawsonia intracellularis
MINHFITIADLGQSKAWELLLRAKEMKDHKTNPYQCMQGKVAALLFEKASTRTRVSFEVAVRQLGGTTIFLTPNETQIGREEPLKDTIRVLSRYVDCIIIRTFEQKRLYELIQLGSIPIINALTDHGHPCQVMADLLTIYEQTSDIANINITWVGDGNNVLNSWIEASMYFPFKLTIATPKGYEPNKELIDFAQKNNAKISITNNPLLAVKDAHYIYTDVWTSMGQEKECKKRIEDFKDFCVDNTLMNQATPSVKFLHCLPAHRGEEVSDQVIESEKSLVWDQAENRLHMQKALLEWIFQ

SEQ ID NO: 11359 - protein, 629 aa, Lawsonia intracellularis
MLDFIRSNAQSWGVKIAFGLIIIVFIFWGIGTLSGGPEVEVVSVNGQSITIQELQKRCEEIEQNIRQNFPTISAAEINTFRIKQLATQQLILETLVLQEANRIGLIITPIELRKTIESFPAFHNTEGKFDPAIYLQFLKERNDTPGHFESQIRTNLLINKIQQEITAGAYISPTEAYDVYMYESATRTIQYLLFPTEDYLNKVNISADEVAKFYNESSEQFKTPTELNLEYLLITPRSLANNQTIDDTTVSEYYQKHKEDFKSPEQIHAQHIVVFAPENSEPEVLKKAQEKINQAANAIKKGEDFSSVAKKFSQDNVAQNGGDLGWFTYEQAVPAFADVAFSLTPGEISQPIQTPVGYHIIKLIDKKPEEIKSFDEVSKTIQQRLAEDKASIELQDVLENVQLALIENKSLTEAGKPYNLSPISTGLFPIKDIASQLELAKPDELSKLTHVSPGTILENPLITKTGYVIIKVKDIKPESIKSIEVVENQISSLLKKQKANELAMKAAEEQLTILKNSSIPPAVAKNLKTSPAIIRSATIENLKNPQLVPDTFKATPGSWLTTPYTVEQGVLIAYVSKEVVYPSKEQWDNIKEAFMSAIVKSKREQMFKGFLTMLEKQAKITIKEEKIIN

SEQ ID NO: 11360 - protein, 492 aa, Lawsonia intracellularis
MMKQHILFLAPSHIITRIFPELRDSGIEVSLAENINSASAAIKKSRPDIIISRPTLPGYKVEELFNIAKEDPKFPPIVVTTDKGTTEEAERLMTLGAQDYWLEPLSTEKIKTVLQKSYKLTPLPSKSTLDGHKPEDLSSAPTIIGSNPAIRRVLALAKQVAPSKASVLISGESGTGKEMFARTLHAWSNRSKGPFIAVNCAALPEHLLESELFGHEKGSFTGAIARKLGKFELASGGTILLDEISEMDLALQSKLLRVLQEGEIDRVGGTETIKVDVRVLATTNRDMEKWVDEGKFRQDLFFRLNVIPLRLPSLAERGDDILELANFFINMYTKEYHLKPTKLSQEATTWLKNHNWPGNVRELQNLMERAVLLAGGGLITPNHFLLETEEWPLFDEVPLEQQTESIIPEVITISNTTQALQTHPQSKSTTATTTSSVFPNAVIPLHEMERLMIIKGLEATSGNRTQAAELLGISIRTLRNKLNEYKEQGFTI

SEQ ID NO: 11361 - protein, 537 aa, Lawsonia intracellularis
MKCNQCEQTAANDSCTNIGVCGKTDNVSHLQDVLIYALRRLAHAALSARAKGIIVPEIDFFTVQALFITLTNVNFDPNVIERFIEQAIINRKTFAQLRGCKIDNSTRPIEEVKSMMSMPTGIDDFHKDKNNCSAMQMLLYGLKGTSAYAYHAAVLGKDDPNLYEFIYEGLAAGFPDREGNIDKERTLSDWMDLVLRCGKSNLRAMELLESGNVESFGVPTSTKVSLGQKKGKAILVSGHDLKDLYDLLCQTEGTGINIYTHGEMLPAHGYPKLHAFTHLVGHYGTAWQNQHKEISLFPGPVLFTTNCIQNPKEYIENVFTSGVTGWPGVQHCKDGDYSKLIERAKELPGFSEDVPGKELLTGFGKQSLLDAAPVILDSIKSGVLQHIFLVGGCDGAKPGRNYYSEFVEKAPDNTVVLTLGCGKFRFFDKDLGMIGSLPRLIDMGQCNDAYAALQVVTALAEILDCGVNDLPVSLVLSWYEQKAVSILLTLLAAGVKGIRLGPSLPSFVSEDILQLLVKEWGIAPITTPDKDIALLMQ

SEQ ID NO: 11362 - protein, 319 aa, Lawsonia intracellularis
MAQTNILLETGTNELEIVEFYIDEPDYRGYYGINVAKVVEIIREQPVTAMPEMRHPSVMGAFLYRNGRVVPLIDLSVYLGGAPIKNTDSRVIITEFNMVMNSFIVSGVNRIHRLSWLDIEPPGKFIQTMSQSSITGVVKMDDRVVFILDLEAIVAELHPSLAIRMDETSDHDVPEHPYKILHADDSASIRKLIYSLLGKEGRFEVTQAVDGQGAWDLLMKYRDEAIAEDRPITDFIEGVITDIEMPNLDGLTLCKQIKEDSVLKVIPVAVFSSLINNSLIAKCKKVGADAQFAKPDLQSLSDSMYSLIKSKELELSRKI

SEQ ID NO: 11363 - protein, 269 aa, Lawsonia intracellularis
VLGVIAGSGQFPFMVVKGAQEKGYKVIVCGFHGHTDSKLEDIADHFEMMPLGQFNRLIRFFRRSGVIELCMAGAINKPRALQVRPDFRAFRLYFSLCRKGDDALFRTIIKEFEKEGFLMVSPSTFVPFLHCPPGVLSNKQPDKDILAEISYGWPIATSLGRFDIGQLIVVKQQMVIAIECLEGTNATLQRGAELGGKNCVAIKIAKPIQDERVDLPAIGLETIHLLVKYQFKCIAVSAEKTLFFDMPEALTLANKHKLCVMSLSDTDIR

SEQ ID NO: 11364 - protein, 338 aa, Lawsonia intracellularis
MSKTRIAINGFGRIGRQTFKAIYTMYKEQLEVVAVNDLYDTNTNFHLLEYDTNYGRANLNANINGNTVIIGDWTIQCLAEKDPTNLPWASLGVDIVIESTGIFKTADQARVHLNNGAKKVIITAPTKGEDIMIVMGVNQDMYDPTKDNIISNASCTTNCLAPIALVLEKHFGIESGTMTTVHSYTNDQRILDLPHKDLRRARAAACNIIPTSTGAAQAVAKVIPELKGKFTGWSLRVPTPTVSIVDFTAILKKNSDTETIRKALEEASNTYLKGIMAYNRTPLVSMDFKGDSHSSIVEEEYTIVQTDNLAKVISWYDNEWGYSCRVADLSNFLRTKGL

SEQ ID NO: 11365 - protein, 278 aa, Lawsonia intracellularis
MLCQDSLVGVRVGCIGCGTMGSAILSSLVPMAHPDNGLILSGYNRTPEKLAPLEEKGVQSIDTIPNLIQQNDIIILGTKPSAVVPILKECLPFLRPGHIIISLAAGITQIMLTEAVESFCPVIRVMPNTPALVGSGIFALCLEDPKLSNEQSQSVIDLFSLIGLPIILPEKQFSAFTALIGCGPAYVFHFMDALVEAAVTLGFPRQQSIYMVSELLNGSAKLATQPGNHPALLREQVCSPGGITIAAINHMDRTAIRGNIIDAILTAYKKEKQLEFIE

SEQ ID NO: 11366 - protein, 138 aa, Lawsonia intracellularis
MQHTFALIKPDAVQRNLIGAIINMIEKNDFYISAMKMLQMNRQQAEGFYSVHRERPFFNELVDYMISGPIVSLILTGENAVTRYRELMGATNPQNAQEGTIRKSFAISLMENAVHGSDSDENAIIEINYFFNAFERIR

SEQ ID NO: 11367 - protein, 445 aa, Lawsonia intracellularis
MSSRLSKYFSKHSIYLLQPYPHMARTILGSGLISLLTAVILSTGYISYQLISTTLHFFQPDKITSLESPKKTLSTLKIPKGQSYRESFLHTDLPYQEKATTSLTNRIRQTDFALMQTFIRLDIHKDRVYPLLTKYYHNKNETYRFQQIKIFLPHSVEYFVTNLQENLEAWADEIKLRACSEHIYKLSINEITTHELIFIPTGEKFIQCPIDEKPRITIVIDDIGESIEAANQLIKLDFPITLSILPHTHYAKSIAMLTHSTGNEVLIHQPMESIQSPYVSAGPGEIHTKMSAEEISNILCKNIEKIPYASGLNNHMGSCFTCNEKGNHTVCKILASKGLFVLDSKTHPSSSFYNIAKGKGLPAYYRTHFIDHGHHTESSILNQLKKAEKYAIEKGQAIVIGHPYPETISALKKWISLRDTSIHIVPLRYQPIYIETVKSDYFSKK

SEQ ID NO: 11368 - protein, 442 aa, Lawsonia intracellularis
MRVWLRVAALILTGSILFIGGSCVIAAVSDSDKFDALKRFSQVLDIVERYYVKEVPRKELVDGALKGMLQSLDPHSTLLTEEEFKEMQEATSGEFCGIGIEITQENNHLTVVAPIDDTPADKAGIKAGDYILAVNGRPTSEMSLQEAASLIRGPKKTEVELTILHKDAKEPTTIKIKRETIPLISIKSRELEPGYYWVRISRFSERTTSELNEVLKAASKKGPIQGIVLDLRSNPGGLLEQAISVTDVFLKEGTIVSIRGRMEESSKEFKATNNTSDITAPIVVLVNAGSASASEIVAGALGDHKRALIVGERTFGKGSVQNIVPLADETGLKLTVALYYTPSGRSIQAEGIQPDIELPFDPNPVATQTQNPLHMMREQDLRKHLEKNTSNTKEEKNTKNNQKSEQNKKEPLPEVKEFLNKDNQLRMGLQLVKTLPKFRQIQ

SEQ ID NO: 11369 - protein, 226 aa, Lawsonia intracellularis
MNPEINYQAILIEIYEKLLNKLQASGWWPAETTLEVIIGAILTQNTVWTNVEKALCNLRNAGVLHDGNKILTLTDSELSNLIKPAGFFNIKTKRLKAILQFFASSCSFSFEKLKDISLQHLRKKLLLVHGVGPETADSILLYALNKPSFVVDSYTKRILSRHKLIQPTASYEDIRSLFLENLPCHLQLFNEYHALIVRTCKHWCHKKTPLCSQCPLFELNDICLNC

SEQ ID NO: 11370 - protein, 784 aa, Lawsonia intracellularis
MLHSNLILLELTVSKQQTLNFIVKGMSCTSCSSRLERTLGNIPEIQSVTVSLNNSMATVIPIPEANIKKLIQEVISETEKTGFIANYLAEDLAEQKTWILQQESISHYLEELKQRLIIEFFFTILVLFISMGPMWGVPVPVFVNPKTYPLNNAIAQLLLTIPVIWSGRYFYLIGFSRLWKMSPNMDTLVALSTSAAIIYSIWSTIEISFGNYYTEPSLYYETAVVLITLISLGKYFEMLSRFRMSDAISRLMNLVPETALRLSSLSDQEESFEEVPLSNIKVGDIVQVRPGSKVPVDGKILKGSSSINTSMLTGESMPVFVTVGDKVIGGTINLSGMFLMHAEKVGLNTALAHIIRLVREAQGSKAPISRITDQISLIFVPVVIAIALVSGLTWLLLGDTSIADSIRIVMTVLVISCPCALGLATPMSIMIATGRGAQLGLLIKSGAALEYAADLDTIVFDKTGTLTEGKPHLIHTVPLKTMPDNELLRITASLEAVSEHPLADAIVRAAHKHGLVLYPVINFMSYPGRGVRGELQVKTESITVLVGNKTFLEEHHISLDNKVGITTLEEFAGQSFISLLVAINGQFSGIIAVTDPIREESNSVTEQLQHMGIRTIMLTGDSKQTAQIVANHLHLNEVIADVMPEGKAYAIQELKNKGFRVGMVGDGINDAPALAKADVGIAIGSGIDIAIETSDIVLLNSLSTNHPLSGLVSALLLSRATLRNIRQNLFWAFGYNIICIPIAAGILKLFGGPLLSPMLAGLAMALSSISVVLNALRLKKFTPS

SEQ ID NO: 11371 - protein, 153 aa, Lawsonia intracellularis
MHILLYQPEIPPNTGNIARLCAATHTPLHLIEPLGFKLEDRYLKRAGLDYWKHVILKVWPQLDDYLLSDGLGRRLVITSARGGVAVHQFMFSADDTLVFGRETAGLPKDLMDQYEHKVRIPIYSTVRSLNLSTAAGIILYQALSITGMLTKIS

SEQ ID NO: 11372 - protein, 455 aa, Lawsonia intracellularis
VKIKNKYQQIQEIWQLTWPQASMLLCQFFISITDVWAAGQLGSEVQASIGIIAQAQMLLLSLVMAASSGAVASISQSLGAKKYIRAQRYIGLVVFSCLILGVCLTILGVIFQVPFLEFVQTPESIFSMALIFFEFYLLALPGQYMLTIGSAVFRAVKSVYIPLYVAIIIGILNFIGDMAFGLGWWGWPSYGAIGIAWTTFISVSFGGVVILFLLFYNHWLTRYSFPPWCWIKKGSMYLLQVAGPSLATAAIWQTGYLVLFIIAGTLPSEGVATLAGLTAGIRIEAILFLPGIAFSMTSAILVGYALGLGNKQEAKHVLLMVVFVACLSMSFLGAMLWPWRDTLAAFLSSDPLVRQEIVSYLSYNILCVPFTIASIVLAGGLNGAGASIYPMIIFGCSIWGIRLPLAWFLSHFLWETSSGVYMALLVSQVVQSMLLLWIVLRYNWARFSMYNSMSK

SEQ ID NO: 11373 - protein, 299 aa, Lawsonia intracellularis
MSEAAFSPVHPSKFDNYTLLWEMTPQHSSDYTLTNIWGWKDFYGLEWMFESGLCWIRQTRHVDGADYIFWAPIGDWNSIDWVNLPLFKRGLHMQRVPEMLCSLLQEILPRKINIEETPGQWEYIYSTKDLTTLSGRRFDSKRNHLNSFFREYKEDYRPIGDSNILELIEFQKEWYKWRECKKSPSLAAEGEVLCDIFKNWGLFPSLRGGALYSNNKVIAFSIGETLDENTVVVHFEKAKPGIRGAYQAINNCFVRYECNDFDFINREQDLGEEGLKKAKQSYYPIGFLKKNYVTVFPES

SEQ ID NO: 11374 - protein, 245 aa, Lawsonia intracellularis
MAMIEIKDIHKWYGEFQVLKGISERIEKGEVLVICGPSGSGKSSLIRCINRLESIQEGDILFEGKSIFDPDVDINELRTEVGMVFQQFNLYPHLSVVDNVTLAPIKVRGVSKADAHVLAMELLARVGIDSQALKFPGELSGGQQQRVAIARALAMQPKVMLFDEPTSALDPEMINEVLSCMKDLAREGMTMVCVTHEMGFAREVSDKVIFMDHGVILEEGPPEEFFGNPQHERTKSFLKEILSHH

SEQ ID NO: 11375 - protein, 289 aa, Lawsonia intracellularis
LSNNIFMSKLLCIEIIADDTQLDVIISILFQYIPYGWEEESLSTGETILRIHCDNSEVKHTVCNKLQSVFPNIKIHVKEVPIQDWSIAWRDFFTPVIADQFLILPPWLLDTTPKSDQQIIVIEPKCAFGTGHHATTVLCLESISHCAKKGYLQPGMRFFDLGTGTGILGIACSLLGLTGIGADIDPIAISNASENIALNKVESQMVITEAGVEAGLGESFNLIVANILAEPLKCLALDLIELLAPSGNLILSGLLDYQADDVEAAYSKLGKAQRVISGEWVALIWNRQG

SEQ ID NO: 11376 - protein, 112 aa, Lawsonia intracellularis
VNTLILSLHLIVCILLVIIVLLQSGKEGMGVIFGGGNTSVFGSSGAGGLLTKLTAFLAIIFIITSLSYNIITNTNSANQSTILDVQIENSSNTTQAHPQSNQESSVDNHQKE

SEQ ID NO: 11377 - protein, 252 aa, Lawsonia intracellularis
MKILIAANWKMNKNRLEAKDMIEKLMSMPEGIPPQRDIVLFPPFLAIDTIKEKLKNSTIVIGAQNFYPAPSGAFTGEISLEMLKDVGCSWVLIGHSERRHIIGELPTLIEQKTKLALSYGFSIILCIGETAQEREAGLVNSVLEQQLRTSLTDIPSKAISQLVIAYEPVWAIGTGKVASQQDIITAHTLIRKILHNMIGNTSQNIRILYGGSVNSENASSILELDNVNGLLVGGASLQAESFMKIIHAGFSE

SEQ ID NO: 11378 - protein, 156 aa, Lawsonia intracellularis
MDPIYTQKCIPLTYSDLPEILALEKQYTSHTWNIPQFVNVLKQKGYKTFGVQTYCKKLIGYIFIYYNQDYLEVINIVVAKQMQRKGYGKLLLNTALRLAAKKGILKIILEVRATNDSAIAFYKSFGFIQTGIRQKYYSDTNEDALIYSKKVTSDIL

SEQ ID NO: 11379 - protein, 179 aa, Lawsonia intracellularis
MNNIFYPIDAFNNDKAPVVEFIDADCKTLIIAPITHAPRLKLGYKVVWVQLFDSNRRIYLSRRASHLVTYPNLWDFSASGYILAGESCEDAALRELLLCFGIDKASLSNPRSYFFPLQENFILSTLYTVSVMTTSIHFCYDYIQDGMFLDEDELTGFSSELSEFLTPSLLWAIHNKIIF

SEQ ID NO: 11380 - protein, 333 aa, Lawsonia intracellularis
MKRKYIAMDLGTANTLVFIQSQGIVLNEPSTVAIDTLSGKVLAVGKEAHAYIGKVPHNIEVIRPLKDGCIADFDMAQTLIANLLQKIIGKWLVRKPHMIICVPINITGVERRAVIDTAKRAGAHEVRLIEEPIAAAIGASLPVLEPIGSMIVDIGGGTTDIAVISMGEKACAQSVRVAGDALNKAVQRYLQEHMQIFVGEIMAEKIKMTLGSLETPPEPLTMEISGKHITNSGPTNLKLDHTHVQKAITPVIDIILKSILDVLEQTPPELSADIMQQGILLTGGGSLIQGLNTCITNLTGLPVNVDRTPLTTVINGAGATLDDIARYKQLLLE

SEQ ID NO: 11381 - protein, 344 aa, Lawsonia intracellularis
MTDNHNGDNILDLIRSVFQVHNVALFLPTEDGNFTLVSASTECEPYTEEFIIPPGKGLVGWVLRHQQPLILNNFDQRQGYLGYYSNNDEKLITSFMGCHLPGGGALCIDSITNHVFTEVDQQLLHRFAKLVVRQINTMGNANNNQRLRRYYDGLEQLFKLHEQTNWKEFLSLFLAIVTETTDSDYSVFVSSVEGSSTYFVEGESSPLVLPHKKPLPEFSLVNGGLLGWVFRNEVPIYAEGTDGSSTPLFGKVSYIPEFQSIICLPVSINKITCGVLCLASCTARPLPQDMRIFTTMATISLAQYLNIVALKYRLNRLLPDATIHRSGAIFYDPDTAPITHIKEE

SEQ ID NO: 11382 - protein, 357 aa, Lawsonia intracellularis
LTRVIVVDDSAFFRSSITKMLTQDSEIEVIGVAKDGIEGLEKIKNLKPDVVTMDIEMPKLDGISTLKIIMDEMPLPVIMVSSLTKEGAEATLKALEFGAVDFIPKYPGNSLASMDLAALSSDLCTKVKAVAARAKRFPLKRIRKDKVPIISPVKKDFFTSPNHSERSRRDIIAIGVSTGGPPAVQKVLSELPETFPACILIAQHMPAAFTKPFAERLNSMCKISVKEAEHGNPIKNGIAYVCPGGRHLRLDLKGALPQISVVSEPSTALYKPSANVLMESVGKSMGGRSVGVIMTGMGSDGVEGMRVLKSKGGFVIAQSEASCVVYGMPKAIVDGGLADEVVDLDNIAERVASALYK

SEQ ID NO: 11383 - protein, 650 aa, Lawsonia intracellularis
MINHNVEQITQEILTRLESDKSDEIRSAAFEAAELKASDSIPLLIKHLQSPNFGVQEAAEYAIRKIRGVETVQSLIPLLRLEDVAIRNSAIDILQEIGADDLNTLYKLLHDQDVDIRIFVADILGSVGSFSAVSMLIEVLENDTDVNVRYQACISLGKLGYSEAKGALSNALEKDEDWVQFAAVEALTKLKANACVDILLAALPKSSDFVASTIINALGIIGNMLSVPVLLQQLDKSTGPLRNATVKAIIQIIGAPSLGLLGEKDLDKLYTYLLVALEDEDEEIVLVAFTGLSFFQGKEATTRKVFERIQKMDSLHDADLLSAAIKCLIDVGYNSALKEGIFSKNEEVVKVAIEVCGSIGDQDCVGLFIESFWILPLELQRFVINYLVNIADTSNLSFFTEVLSRHTDISIIKAALLFLGKQLSPALSSDILSYLYHPDVEVRKTALEACLALNDEQINKQVIELFFNEDPSLRMLAIYAMGKISPETYVNSLLLALKDSSGEVRRAAIESLGELSKITPELFESISSIVYDECKEVRLALINLAKKIGTQQSLSFIINMLEDSDSWVVIRAIEALIDYKTEEVAVLAIINRLENADVLVTMKIIEALGIIGGKLAFQALLNLINHENPDIQQAVSDALSYIQEEQGEDF

SEQ ID NO: 11384 - protein, 291 aa, Lawsonia intracellularis
MALPIETTSLRSSPGITDSEFKQLRDFIHQKSGIFIADNRKYLIENRLVGRIRALNLKSYGEYYSYLKFDPNRQTELTYLFNAVTTNETSFFRNPPQLEVFQKVVLTRVIEEAKKSGRKKLRIWSAGCSSGEEPYTIAIIIHELLCTEISHWDIKITANDLSESVLSIAKEGLYSEYSLRTTPKHIIDKYFTREGQGYRIKSNIKSLVSFGTINLKDKVQVSRVERSQIVFCRNVIIYFDDEMKKQVISAFYDNLLPGGELIIGHSESLHSITKAFKLEHHTGTIIYRKQD

SEQ ID NO: 11385 - protein, 256 aa, Lawsonia intracellularis
MKIIAIANQKGGVGKTTTALSLVAALTRKKKKVLFIDLDPHVCASVHLRYYPKGQVNTLYQILIANREELPLIWSKVILKRDSQAWDVVSGDTRLSEMESILHPFKRKGFILKYALSLLSDKYDFIIIDCPPQSGVLLINALVAADLLLIPIQTDFLALHGLKLLCDTVKIINRRLQQPIPYRAVATMYDKRTKACRHILEVLQLKMKNIMFSTVVPIDTKLKEASTAGKVIFEYDAFSRGALAYESLAEEVVSLW

SEQ ID NO: 11386 - protein, 156 aa, Lawsonia intracellularis
VVTDKYIQSIPEIQLVGFQLGSQLYSIPTVVVQEVVRKVPIFKLPASSKVVSGVIKLRGYITPIVQVSSLLNITKNFLGEGSMFTLICNYKAFQFGIPIDNIHHMYRVIHEDIQWSVDSLLGVAGEYIIGLFKLYEKLIPILSIERIITDVFQRKV

SEQ ID NO: 11387 - protein, 122 aa, Lawsonia intracellularis
MSKHILVVDDSKTVRNLMSFVFKSKGYQVTTAEDGLDGLEKLYSVDKVDLIVSDINMPRMDGFTFIKSVREQDLYRNIPIIILSTEKEDEDIKKGMKFGANLYMVKPAQPDTLVRNIKMLLG

SEQ ID NO: 11388 - protein, 214 aa, Lawsonia intracellularis
VHILYKRYVVMSQDFMDPELFADFIIEAKEHLETIEPNLLELEKSPNNLALLNEIFRPMHSLKGASGFLGLNKINHLAHKAENILDELRKGEMVITSEIMDVILSATDALSQMIYNLEKTSSEGDVETESIMNLIDAIMSGELNVTATIVQPTQDTESNTSESKTQLTTVLEAVDQPATPVPLEMIDVSPVNQVETKVEAIPSHEKKNRELIFP

SEQ ID NO: 11389 - protein, 737 aa, Lawsonia intracellularis
LKGNSGIIGFHELNSLTHEAETLLNRVRHGEMVATHELIDLLLLVVDVIDSLVERIESSTGIVQPFDISEILVCLQSAVAGKDITLPKALIGSLNTVDSLEQNSIEHGVETIENQVSQTSTESSSAFNSSDKENEIAFAVTVKQQQSTIHAALEALAQDSSQREYIDALYRSLISIQNAAGVMGYDELKVYAERTAGLVAQGRDSGIDFSLMLDILTQEVAIVDDMIAVILAGDGITQLSSSPIEQKEVLSSQDGNTTDTVSSTPVVSAEHLTSLKSSSLSTQESPGQIESHVPSKPGPVLKTISNVPKNIKPPSVKSSQAKPANANDATSEQKSSSTIRVDHEKLDHLMNLIGELIINRNRYTMLARRLEEQGTNADVVEVAQDLSETTYAMARISDELQDTIMKVRMVPVASVFSRFPRLVRDLSRKSGKEVDLVLEGEETELDKSVVEVIGDPLVHLIRNAVDHGIEPESERIAQGKSTKGKVTLRAYHKGNSVAIEIEDDGKGLDPDKLREVAIKKGILSAEEAKLLDDREAMELIFAPGFSSAEKITDISGRGVGMDVVRTNIKNLKGSISIFSEIGKGTRFTLSLPLTLAIIDALMVNVAGEVFAIPLDAVSETTKLEASKLNDINGRKAVTLRGEVLGLIELSELLNLPQEEHTDVLSVVIIHSNERRLGLVVNKLLERQEIVIKPLGSYLGDIPCISGATIMGDGGVILILDPHEIYLLSTSAAKSVSQ

SEQ ID NO: 11390 - protein, 106 aa, Lawsonia intracellularis
VGTTSSHHGPYAWGYTRTTMVHTKGSKTARWSQSQKMHLSPDWSLQLDSMKSESLVIRDQHARVNAFPGLVHTARHTTKVGFTQSRRANEQSRQSSTVGLMIGVKS

SEQ ID NO: 11391 - protein, 125 aa, Lawsonia intracellularis
MWSHLKDAPTACRQLVSDSISLPLQGFFSPFPHGTCSLSVAEEYLALEDGPPRFPQGYTCLAVLRYRLCLFQVQIRGYHSLWRNFPVLFSCLLQNHVCRPYNPNQSKLFGLGSSRFARHYYGSLF

SEQ ID NO: 11392 - protein, 164 aa, Lawsonia intracellularis
MFLVNSRHHQFTAASRSSNSFIFTPKSAPSSEVTGPFCRVPWPEFSRAPWISHPTHLSWFAVRFDTYMLRSFSWQYRLNSFRTYVHGFASRIHLVDLPARQFYMLAPGLPTPGLPTFLRPSITLCIKYRNINLFPISYGFRPYLRDRLTLGRLPLPRKPRVFGE

SEQ ID NO: 11393 - protein, 99 aa, Lawsonia intracellularis
LPPPILAYRFHWLPPILHIQAQNPMSSYSKGAQGLPVFLRIHGIFTATSISPSLWPRQCGDRYAIRAGRNLPDKEFRYLRTVIVTAAVYWGFNLVLCLR

SEQ ID NO: 11394 - protein, 93 aa, Lawsonia intracellularis
MNSWMRSACYPRRTFYPMSDGPSIRDHRITNANFRSCSTCLSCSQAPLCVCTQRLVSDQAEGTFACLRYILGGDRPSQTTHQTLSPARLTGQG

SEQ ID NO: 11395 - protein, 667 aa, Lawsonia intracellularis
QTTSLSIMQKGDVMGITLRTKLFLLVIVSISMAAIPIIFSAYEDFRSSNIELERKTFRSITSFVKDGLEARYFDILTYQATNTLQSKNQLRRIAMMLDSNLNILEKFPSKEQSTFLQEWIKQLQQLNIHIEVYNANKKPLVNDPLFTTLKTKYNLKDAKNRSFESLLNYEQLPINGEFTVFENKNSSKSDPILVFLLPSPEDQHIILTAINISDISKNALDAEEQLAKTIREKIEGFDLHKDGFIAVFDSDGTLIAHKGNNIGKKIDFISEKTLEEARNKSMSEEVISLSKDEKLLLHVAYFKSLNWYIVAAAPQSEIEAPTRALIHQLVGIALAAILNSLLVTLILTARLITPLQTLTEKALSLAEIDFSSPEAEELATADLPIERSDEVGQLSRAFSMMGKTLTQNIRELMETTTIKERMLGEISAARDIQMGILPTTDTASLVPHYDISAFLDPAKAVGGDFYDFFTSPEGKQVVVIGDVSGKGIPAALFMSMTVTLIRYAIGKGLSPAEVAKEINEVLRKNNPSYMFVTLFIGIFDPESGILEFVNCGHCLPYIINSTTDKPITTLDNSHQSPIVGVLEHAEYVNNQTQLHKNDICFLYTDGVTEAMAPNLELYGTERFEKTLDMNRKKSLKGLIAAVNQTIIEHRGEAEQSDDITMLAFMYK

SEQ ID NO: 11396 - protein, 426 aa, Lawsonia intracellularis
MAETVFNEFIFYETLIDLCESIAWEKPVDENKLFTLTKHGAAPTQVMRLAEAFGLMLVKVEAKNLQQAKLINDLQLQNKELESTKKILAEQNTHLSRTIQENYQSQKIIGQCDEMHKVLELAKAIARYPINTLILGPTGSGKEVIAKMIHYSSPRSAGPFIAVNCTAIPDTLFESEMFGIEKGVATGVNYRKGLIEEADKGTLFLDELADMSLANQAKLLRVLEEKEVVRVGSSKPIPIDIKIIAATNVNLEQSVKEGKFREDLYYRINVVEIKLPPLASRGDDILLLAQNFLNYHCSQLHRPALTLSHDVQKKFLAYSWPGNVRELNNEMERVAALTIGDTVESSDLSQRIIKEWEENTQDIQENLTTPSETSQRQDSLNLQQMEYNLIIRVLKQTNGNKSKAAELLGITREGLRKKLLRLKIFD

SEQ ID NO: 11397 - protein, 122 aa, Lawsonia intracellularis
MKRVSLLDASIGIGTILGPQETPEPTIPQSRSLASTSLTTTSLEATYAPSNIQTVLEEAICPDAGDGGLLIPSVFSSNLQKCKENLSQSNQIEIQNFLQHDLEPLIDNEALLKMYVSLMIEG

SEQ ID NO: 11398 - protein, 398 aa, Lawsonia intracellularis
EIVMANVSGIPAPRLLSTTNQMTNAAAGNTNRATGSMNGRNLTQIKTPQSMIDNASEELTTSLESKSSDDFAIKDRKRQGKGSDSLLKMVQEYTELTNDDTRNAKRAMLSQVLRASQSSQDVLEKTLEQFSNKTDAWASLAEIAQEYGAESPQPTGLKSVLDAMETLENEFGDEIKAGLKGALNSKEFTDIGSAAQLRDLYTTTVTITAAPDAVLARLLEEYESDDDLDRAIDFLLSTLGGELESADPSMDKVHLQSVMGDIEKTQQLHSSHKQCTTALSRWKEKHKGGGENSTLTPLEMMRELIALKNENFISPSSIDKIVDQADPQDIEKEVLFLQEMLAAVRKFPIMVFDNVENRVRVMGAVQDAVDDAVRREDEFLFQKEHPDVPLQPDENNIQ

SEQ ID NO: 11399 - protein, 228 aa, Lawsonia intracellularis
LIFNIVFTGGGNIMSDSTNLSSFGFQGNSMNDFTNSEEMSQPSEVQGNSKEVRSNSERGIPRITVDPTKNPTPMFRYAMLELVTARNIRESATSLMNSIADTQREQKAASSYLDQFRKHQSDVSQGHGSGSQGKWERIQQWQVDWLKSHNIKYPSKVDTGDTWLNADEWDLICKGTQAYIDNIGSSTQQKMVQAQDALGQYNAQVQGATSSITNDIELSRSVNTTQPF

SEQ ID NO: 11400 - protein, 196 aa, Lawsonia intracellularis
LRRCSMSITGVSGATGATGAADVTGTAAPKFAVDPTKNPTPMFRYAMLELVTARNIRESATSLMNSIADTQREQKAASSYLDQFRKHQSDVSQGHGSGSQGKWERIQQWQIDWLKSHNIKYPSKVDTGDTWLNADEWDLICKGTQAYIDNIGSSTQQKMVQAQDALGQYNSQVQGATSSITNDIELSRSVNTTQPF

SEQ ID NO: 11401 - protein, 168 aa, Lawsonia intracellularis
MSGVAPVGVFPLPNPDNYKDNPVAMYAFVLLLYADSYRQASMNKMDELEVLQGEQKEANDMIGSFNQKLSEVEKAGGGGVTRPMTAAEKAWCDKNGINVPGYPNLNAENWTAVIKDTQKVVDTKSTDIQSTMNIIKEATGQYSSFMQGTSTNVTASNQMLNSIAKNIA

SEQ ID NO: 11402 - protein, 179 aa, Lawsonia intracellularis
MVMKQERQETQAATSEAPVMGTDNDMERVEAIMDALSTGSSIGDIIGITQEQMDVLYTIAYGAYQAKNYQDAETLFQALCLYQHMDERYWMGLAGSRQGLENYKGAIEAYEMAGLAGSLGDPTPFLYAGICYMKFGDKESARVAFLSTEALCQEGNRKHDLVKERAKAMLEILSGGVKQ

SEQ ID NO: 11403 - protein, 396 aa, Lawsonia intracellularis
MTNFGDISGSSARMSSLMTGTSGEEGLEELEGGVPKEQGGPGKGDASEAAKGQAAADSINSAGGTEKPGEVGDKEDVGEGGEIPEGGEIPEGGEEVPEEPPYVPPPLVEPAKISTVTDLSTLMGSLQLTEQKKNAEKTVNEIKAQNKEQQVKFQEQIKKIEDNIAESKKSGILKFFQKLFAVIGAVLGAIGGALAIAAGAASGNPLLVAAGIMAIVASIDAAMSSLSDGKVSISAGISKALEAMGVPAETAQWIAFGIQLAMIAVTIAIGFASGGGGAMAGVSKIADMFSKSQDVAKLAQMIEKASKIVQIAGSVNQSAIGGTGIGTAVVQSNIKANESEQKEIEAAIAKVKAKIETLQDFFKNQMEQFNAIMKIITDIIQDSVNTKIAVQRGARE

SEQ ID NO: 11404 - protein, 265 aa, Lawsonia intracellularis
ILEKTIMISLNNSSIQIPQQNIEESTSQEVTSSSGGQPAKVDGVSIQAPKAPVTSAASNLEGVQQREAQENVTKMGLPELSAPKGGGYVQSTAAMFAEVTVDAMNQQRKAAQDVQNSALEGMVNKMLEAAKDIKEQSKLMMGLGIASSVMTTAMGFGGTIGGVKSMTANPGVGTTPQAQVTSNKLTLGKEIAEGIRGGMDTGKESQVKSIDADIRTTQAEEKKLEAQMELVKQFAENSKNLAQQALQIMSEVTRDANATTQRILA

SEQ ID NO: 11405 - protein, 583 aa, Lawsonia intracellularis
LKVLFYILLWSILFIHLVSVSKAETLFSYLYTHYSEQESLGSLLTDFAFTQGYSAIISPAVRGNVSGFFKDENPYQFLEGMRSAFGVMWYMLGKTMYFYTQAELQRVFISPQVMTVERLYHILLNSSVISPQLPIQLNGDMIILSGPPHYIEQVLQAVSIFEVSQLSNITMRVFPLKYASADDIVIQSMDKTVTVPGIASILRAMLNGQQETATTIVEQPATVNKLNGEGLASKGKEKTEKGNEVKQQAAGVNIMADPRMNAVVINDAAYRMPYYEEVIHDLDKPLELVEIHAAIVDIDSEFKRDLGFTLQQGSSKKSMTMGGDFSTTQQSLPLEITKGTVEGGGLTYSTIYSKGVEFFLARVQALETEGEARVLGKPSVLTVDNIQATLENTSTYYIQVQGYQTVDLFKVESGTVLRVTPHIIYNNDGTKSIKLVVAIEDNQNDNSTDPTVGSNVVLPPIKQTRINTQGVVNTGQSLLIGGYYYEQQGVNDKGIPILKDIPIIGYLFKTNTKTSKKMERLILITPRIIMPNTVTPIPAHVDDPSFHRSAVQDTYDDIKPKSSTGGGCSRKRRAPVIEEQRLG

SEQ ID NO: 11406 - protein, 473 aa, Lawsonia intracellularis
MSKVDGIGIYVFSGPHVGAEIILPEGSYTIGTSDSCDIILTDISLAPRHAQLDVHIGESENTTHLTVIPLEGGVWSNNQAVPESGFQPKPGDFWYLGNTSFGWNFPGKNWQNKAAQQYAETLSQAENDNNNLGLEGGTTQTQEQKDDLVKKVFGDTHPQDVISKIDKFSMGKLIGVCLLILFLGAIAISYQRDSVDEKTQVAFLQKVLEDNGFSGVSVIPGAQQIIIRGVVQSDVQRQLIYTLAQSVHSPVYIDVGVRDDLVNAVKAAFASRGIHISVKEFSDPGIISISGYMKDGFVEEWSISAMRDDIPIPFKLEKHIVYAKEVAEVLDKIFAENKIGSLKVTYLAGEIEIVGSFDEERTKKLDKALAEIKKELDVPIMFKIQQIKPAPITSAQKGQPVKDESDEESSVLGGSVIKGVTLLPIPFITLSTGERIFKGGVLPSGYTLDSVSLDKLIFSKDNQYKEYPLRGAN

SEQ ID NO: 11407 - protein, 159 aa, Lawsonia intracellularis
LEGYMAVETGVVAQSKLQKILSEESGLYSQDPSGALSQPAPEDVQNFQKILEDDNQPQLNVISPSYHTQAIEPSVQTENIVPVEEVHEVEQIDLPTDVQDREIAINNSSQMVADLNTGVITPVELLRLQKVVGVVQTQAVTTTQVSQQVEQNISTFLKE

SEQ ID NO: 11408 - protein, 278 aa, Lawsonia intracellularis
VYLYMENVADSNIRKLKVIEWLFFQKKTIVLLLAIILLYGCKVEVYQGLNEMQANAMLATLLKHGIVAEKQNTGKAGYTIRVDKSRLAESLELLRESGFPKEQYKSLGSIFSGEGMIASASEDQARLSYALSQELAGTFSRISGVLSARVHVALASGDQELEQRTPASAAIFLLHTPSSPVVNLVPKIRELTSMSVPELSPDKVSVVLVPVRESITIPTVASLSSIGGMFFSNGHATYVLLILAGITVLMMVALLYLNIIFWKHVWTAYSESKSNTDN

SEQ ID NO: 11409 - protein, 226 aa, Lawsonia intracellularis
LVIRKHCVMVTQKRYTDFPSILFIKSNMFFPAHGVHILHEKDVKALLTANDFLEETDKYLKNATQETEKFYKEQYALGYNSGKEEGSFEHALKIFGTIFSSIKFVENIETTLVRVVTEAVNKIVGEVDTLNHINDWIQKDLLQLQRKYQLTLYISHNDEKSVTIYINTLCANKPQLKNFLHIVLDDSIKPGNCRVESELGNVEASIKTQMKALEQSLGVSTELEVE

SEQ ID NO: 11410 - protein, 293 aa, Lawsonia intracellularis
VFQLNWRWNNNMSNTKISTYSFGDKPGSTITGGFGAQKPTSSDINFFEQSIIKHDDYPNNYEVKEDNSQEEVEEKPTTQPPKEQVTDKTEGKDEAFIEKDDAIGKDKDKIPGKGEPIEKEDGVDKKEPIKDDKVVAVKNHEKDDDSSSIKDDGLDKQITPMMLLSMVSGKDDDLKVAHVQQINSPTIDLTELVQRIMVAAPSSSNNGEVRITLAQGFAGTDVILRRDKEGMLLVNFLASGTAAYNQIANAQDLLKRRLEVVEGKSVNIEISDKQQETEKVTAVEGSGTSTTNQ

SEQ ID NO: 11411 - protein, 368 aa, Lawsonia intracellularis
MVQTTQKLFEPANLLPLSAQVYNTASMCIRPWQFMLQDQLCTLDLLFLHDPFSSVYTIVIHCGEGRWVIEFGKVPPLSLYPSFKDKPEVLCVPEEVKLAVFELLISPFLHQFENMMGTPVELVSSTLSPPSRDNFSVACSIPLVLHVEGNENEIPFLVKIEKENDAILLLSQLQEFPLAYSDVGPLSISVGIEVGYTQLSTQQLQQIEKDDILIPDQFFIQEKKIQLRFSRFLANCTIQGGMATIMDVNDVGYPEDQGNGGEQFVENHTEAPNSHGQQRTARANSGRQSGQQSSGIDVSGLDLPVVFELERQFMTVQNIGLLAPGYTFALSVDVQAPVTLRVNGKAIGVGRLVDLNGSLGVQVVQVML

SEQ ID NO: 11412 - protein, 112 aa, Lawsonia intracellularis
MRVISEENNGVIVISLDGRIDATTTTLFEDACKKAFETGVPAVIVNMEKVEYISSAGLRGVLTMLKLGNGASVNLVFCSLGEMVSEVFRISGFNSVLTIYPTIKEALAALSV

SEQ ID NO: 11413 - protein, 147 aa, Lawsonia intracellularis
MATLTIPSGIEQLPHVNAFLRKSIPMAFKKRIHLIELAVEEILVNIFRYAYHNENGNAEVSCQFVKHNGTPYFVITIKDWGEPFDPFQVPLPDLSLDINNRPIGGLGVHLVRTAVDLYKYKRESDINVVELFFQFLAEGMGNNNISI

SEQ ID NO: 11414 - protein, 232 aa, Lawsonia intracellularis
MLRIVPLKYTLFAIITLFFCFFDTTNILANEILKNIQYTNKIAEQTMLAMQYRVKQARTPQKYHPSEPIYENLLDQMDVYSLSPSAKKIVLHRMIPTYVKEKVFRGEIKLPSDWKEIIQVASTKHNLDPALIAAVIQVESGFSGEALSPKGAKGLMQLMPDTGLELGATDLFDPMTNVDAGSRYLRQQLDRFGSVELALAAYNAGPGAVIKYGGIPPYKETQEFVKKVLSAF

SEQ ID NO: 11415 - protein, 161 aa, Lawsonia intracellularis
METNSSYRGSDDSSLIQLVTFKIAGEEFGVDILKVQEIIRMMPITKVPNAPLFVEGVINLRGKVIPVIDMRKRFGMPSSAHDSQTRIKVMDLQGQVVGFVVDAVSEVLRIKESTVEPPPPVVAGVGSEYMRGVGKLQDRLLILLDLDKLLTESELETLSAL

SEQ ID NO: 11416 - protein, 562 aa, Lawsonia intracellularis
MFKKIYVFYITLLLIFLTYVTPYDVWSFDLTILHTNDIHSHLGGIKKESGNPCFTSTTPDCVGGMARLAQSILDIRQSTPNTILLDAGDQFVGTAFHSDFINTPDQLPFVKFLNRLGYVAMSPGNHEFDHGCYEFFSAIRQLNFPVVVANLTFTDPEMQSSITPWTIVEREGKRIGIIGLITEATATGSRACSQAIFTNAEQALRNAIQEIKKQNVFTIIVLSHLGINVDMELASKVDDVSVFVGGHTHTLLSNTYPNAYGPYPIVKHSPSGHPVLIVTAKEKLEYLGRINITFDEQGIPQKWNGDVIRLDKPISNDPAIVSIAELLDSYGIPIKEKLEVKVGEIAHPRNPNFDTSQPSNEQLDEKPFFYCRKQEGLTANIILDAILEAGRSNGAQIAIVTTGLIRGNLPIGLVQKLDVVTAIPIEDKLYVGDVTGKIIQEAIENGVSKVHCFAFAGTFLQVAGLRFTLNAEKPVGERIQSIEYLNNGKYEPLDPNKTYRVIINGYPTEGHDGFIMLKDIKWTDIQKSPVEAVISYLKEHSPLNVKKDGRIVNVTPIIVPNE

SEQ ID NO: 11417 - protein, 327 aa, Lawsonia intracellularis
LYKSQKSSLDYAVTNINKALEEDNLVLLSNYVDFDSLSKNFVHSILQYWSSFRIDESRQKELEDNVQQIILLALRHNDKNQGNNITSDSSITSIQTIDQKMPFSFLPKDFLKQLKEKKFTIYRQDEDIAILKTSIVHNEAEYHTELSLLVQRVAGKWHITKIINADELVKLHMAALDKKEDQLTHEVAVRNDYIRNEMNKYYHVSECNAFVIKKENSNDEDVPLTISVGGINMGSEVLRSAGMRCFLYDIHKNILAVLPLTMAKNVSPGDFFEQEWYMEIPENVLGHSFLLMKDNTISCAIEVTTVILADGTFLYLTPTPEKERLHP

SEQ ID NO: 11418 - protein, 821 aa, Lawsonia intracellularis
MLFLLRFILALLFIPLGITISYAKDTLSDHSSSLSLPSKAQVVNEVWMLLLQSRVGELEAISYELSSLFKELPNFSQQLSNNIQEIEKKYQQYSAMAKVSRGLPIELSLVEERLKRLDNQLSVVMSPLLDTLNILKVRLNEVSLLEEDAGVKTENLGSSKDLDIFVKNLAEVENKLGRLEKRVNEILKPAYMLRNNILAVQRQLLEIIPSLWKSYYLAPTGKIYEPASWLNIYESLMSFKETLLVRIAAELPESKQDWGSSLLRFFVILIPLVLLLVVFYSFSRHWSDELKNVWGHISKHSLILLALGLAFHFSAWVPAGENYFLLSMIGTIIMSIGQVGLAWSLYTLDKSNKPKFSPFWKLLIPFFGGILLLLFNFSGIILTLLWVGILLVSFYYDQKKCKLEDSFSLVNNLLQLHIVILWITLIMTMLGWTRISILLCMSYAALAICIQQAVGFVRLANIISKYIPQEGFHGLFSGMLLAVALPAILILAISITGLWILAYPGGAYLITHITKLDFSIGKVSFSLVQILFLVSAFYITRSFVSVGRMFIANLPKHNMGMDRTLIGPIQTGFTYTLWAVFFFSTLYMLGVSLTSLAVVAGGLSVGIGFGLQNITNNFISGLLIIFGQTLREGDIIEVGNNLTGIVRKITIRTTLVETFDNATIFVPNAELLSGRLTNWTRNGRTVRKDINIGVAYDSDIGLVMGLLKEIADNHSQVLRYPEPMVVFSDFAASSLNFILRFWVGDLSQAPDIITDLRVIIAKRFTEKNIDIAFPQLDIHIRNDSVLALRRISPMASSELQPTKSIEDLPGVTNNKPIIANS

SEQ ID NO: 11419 - protein, 387 aa, Lawsonia intracellularis
LYLYSIRLLSIQPIAILRAMLTSGWFVDAFLYFFEGKGKVTRSFLCVCMLVVGGMFFIFISGAFPDYRGIEIRKPLSLSSLPIPPQKDTRPLSGSFWNIRGAFVRQEIPSDINSPILFSSQNMFQFFEDSVGLRTAKGVTPLVIKEMDETIAELFSTNTMLITSLGEPLNFEGVPLRWNIGRNLCEMTPQSIARRNQFLNSWMKLTTFSKSLVQQAGQYKEIVEKYSKKYNLSAELIYAIICVESSFNPAQISNRSAHGLMQIVPEMAGVEVKRWFGYSGLPTAEELLHPETNIKYGTSYLYLLMTRHLRPITNCLSREYCAIAAYNIGVGAMLKTFAVTPEEAFAIINTYTAAEVQEHLMQKLPAKQTRVFLERVLTFKESFTVLL

SEQ ID NO: 11420 - protein, 170 aa, Lawsonia intracellularis
MPKLFILLFYTLIFFSGCCVTSKVGVIDPIRLFQESEPGKIGMNHLKTIEDAMQSQIDLAQGILEKFPKNENVRVRFQNIFMEYQQKLNTEQQKVVEVMNSLIQKTLDEYRVKNGYNVIITKDSLLSYDSSSDITNDIITILNSTPLTFEPVVLDRFDPETIVPPLSNNN

SEQ ID NO: 11421 - protein, 259 aa, Lawsonia intracellularis
MSLSLNQTLCIQCGQCVKVCPVSILVRRSKNIIIKNNRLSHCLHCGHCVAICPRSALTLDLICPDLLQKATKPSLSDQQRTMLFKSRRSIRFYKEQSISFDILNESLDEARYAPTAINSQQVEWILVEGKEKLHELSSRVADWARTIPGKYSKIAAAFDAGYDPILRHAPTVILAHAQKDSKWGAQDCTAAITYLELALHSHNLGSCWAGFVVAAANQDIDLGLSLPEDRKIYAGLMVGYPSVHFTWIPTRKPLRLTVV

SEQ ID NO: 11422 - protein, 957 aa, Lawsonia intracellularis
MNKCIHIEGARQHNLKNITIDIPREKLVVICGPSGSGKSTLAFDIVYAEGQRRYIESLSTYARQFLPQMDKPDIDKIEGLSPAISLEQQTTGRNPRSTVGTTTEIYDFLRVFYARLGKMYCTGCSKPIEARSVDEIIADILALPEGTKIILLSPLVELQKGTHIEKLKKLKADGFVRVRIDGILYTIDEAPSLDKNKKHTIELVVDRLIIKNDIRGRLADSVELALRYGGGHVIIHEISISDEKKGIDTIHATESVCTSCRISFPTLTPQFFSFNSPQGACPRCSGLGTIEYFEPLLIAPNRGLSLNTKAILPWANPKIFHRYESSLKELGRKYGFNLSTPLSEFNAEALDILFYGEQINDTPSQLSKSKKTVQKTIDNQRWSGIIPILEQSLQYGDMWRDILSRYLQNMDCPVCHGARLRTEALAVQIQGVSIQELCTIPVSKTLNWLQQVIFSGRHAIIAEPLLKELIHRLKFMINVGLDYLSLGRTMTTLSGGEAQRIRLASQLGSGLVGVTYVLDEPSIGLHPRDNERLVSTLRSLQKRGNTVLVVEHDEATIRESDMIIELGPGSGLHGGEKVFQGSFRQLINESNTLTAKYMRGDLTIPIPDKRRQPKNYLTLQGITTHNLKNITCSFPLGTLTCVTGVSGSGKSSLVVDTLYKHLALAHGIRVDQPGIIHGIQGIEKVERTISIDQTPIGKTPRSNPATYTKIFDEIRNIFAMTPDAKKRGYQPGRFSFNVPGGRCETCKGDGQLRVEMHFLPDIYVTCDICNGKRYNHETLEVRYRGLNISEVLGLAVHEARKFFTNYPILERKLAILEEVGLDYLQLGQPATTLSGGEAQRIKISRELGKRSLPGTLYILDEPTTGLHMHEVGKLITVLQQLVDKKATVVVIEHNKDVILASDYVIDLGPGGGENGGHIVASGTPEEIMQDPQSITGKFLLEEVNVQRSYHTINGITL

SEQ ID NO: 11423 - protein, 236 aa, Lawsonia intracellularis
MHLLKLYNDPRPLLLLTIVCGITVWWLSPLYLCIISFCLLNCLYNPFFNQSIYKKSTLYYHAIFFVCSWCMIKFIIDSLTMPISCYELLTNTVILGLRLCVLILLGLCLISKTTPRHIALAAGWYLRPFFKQHTWEITLALSLMLHTIPRLFHTVSQIQATTRHRLSLLSRLQHIQVIMSTTTRILIMSISKQSTVIIAKHLASPEPWELNHPPKTYSMFIAIAISCCLIYLSILS

SEQ ID NO: 11424 - protein, 246 aa, Lawsonia intracellularis
MIQLNSVSFQWPQEHTPAVQDITFSLSSGSLLCICGSNGSGKSTLLQLLAGVQHICEGTYIMDEICCPGSESSLLKKTALLLQDVEIQLLGSTVKENLLLPWSNPKDEYKQKAYELASLFALEKYWNSSVHHLSHGQKQKLNIASALMLKPDLLLLDEPYSGLDYPATLQLSKILQQLGQKGLTRIISVHDLEQIIDITTNILILSEGKQVFFGSPKETLHMISEHPEWNIRLPSFWIQNASSQII

SEQ ID NO: 11425 - protein, 185 aa, Lawsonia intracellularis
MSSTFTRINTIVWIAFFAALIAVSAFISFPLGPIPFTLQSLSISLTGLCIGGKRAALCVILYIFAGCIGLPVFAGGKAGPGVLLSPTGGYLIGFIGLAYLTGFGSGHNKNCPPKKAITILFMSLGLAVTYFCGATGLMWVLSFSPTKAILTGVLPFLPGDILKLVIAFAIWKYLLKKGLLPNDPA

SEQ ID NO: 11426 - protein, 884 aa, Lawsonia intracellularis
MLTVNDIRQKFLGYFKNYNHQEIPSSSLIPRDDPSLLFTNAGMVQFKKVFTGQETRNYLRATTAQKCLRVGGKHNDLENVGRTARHHTFFEMLGNFSFGDYFKKEAIQFAWAFITEELNLSKEFLYITIYKDDDDAYDIWVNTIGVEPSRIYRMGEKDNFWSMGDTGPCGPCSEIHFDQGETFCCGDNCGIGSCDCDRFLEIWNLVFMQYEQLPSGERVILPKPSIDTGMGLERIVAICQQKSSNYDTDLFQPIIQYMASIAGVHYKKHEETDIALRVIADHSRAIAFMIADGILPSNEGRGYVLRRLIRRAFRFGKQIGMNQPFLYKTVNKVVELMGDIYTELYSRSEFMSRVVFDEEERFSITLDKGLILLEAELNALKEKNTKELPGDIAFKLYDTYGFPLDIINDIASKKHFAVDEANFQHLMQEQKERARSQWKGSGEKRIEACFQTLLEDGMQSEFIGYENLSGTGRIVALLDIDGLPIEELPTKSSGYVITDMTPFYGTSGGQTGDIGILSTITGKTQVVDTLKPATNLIVHVVTVTSGTILLDQEALLVVSESERLDTARNHTCTHILQSVLQKILGDHVRQAGSLVSPTRLRFDFTHIAPLTEEEIHAIELQVNTIIMANLPLRVEFMDQQSALEKGAMALFEEKYGNIVRVVTIGSENQTASIELCGGTHLTSTGQAGCFIIVSETGIAAGVRRIEAITGRNTLAYIKEYQKELSTTAAILKTKPEKVVEKVTSILSENKNLQKTVDTLESSSLSNQGKHLLDNLTRINNIDVLTANLKNFSLKALRDIMDDIRSKLSSGIVCLASTEGTKVHLLLYVSKDLHHNFTASELIKKIVVPIHGAGGGRPDQAQAGGTNPSGLSETFELLKNILEDQ

SEQ ID NO: 11427 - protein, 355 aa, Lawsonia intracellularis
MAKKSISPEDSRREALKTALDTIERKFGQGAVMKLSDDVHVKVAVIPTGSIGLDLALGIGGIPRGRVTEIYGPESSGKTTLTLHIIAECQKLGGTAAFIDAEHALDIAYAKRLGVKTDELIISQPDHGEQALEIADMLVRSGAVDLVVVDSVAALIPQTELEGSMGETQVGGHARLMSHALRKLTGTIHKSHTAVIFINQIRMKIGVVGYGSPETTTGGNALKFYSSVRMDIRKIQTLKDKEESYGSLTRVKVVKNKMAPPFREAKFDIIWGTGISRSGELIDLGVEAGIIDKSGSWFAFGSEKLGQGKEKVRALLDENTSLKSSIETALMEHLGMNPEKLLCPVSDELEDNYDI

SEQ ID NO: 11428 - protein, 651 aa, Lawsonia intracellularis
VSSTYYISTPIYYVNARPHLGHAYSTIVADVLQRFYSILGEKTFFLTGTDEHGEKIIQAAEAAGYSTQEFVDSISRQFQNLWPQLNITYDAFIRTTDLQHKEAVQKFLQHIYDAGDIYFGEFGGYYCLGCERFYTEKELEDGFCPQHKTKPEFIEEQNYFFKMSKYLSWLIEYLQQHPNLIRPERYKNEVLSLLESGALEDLCISRPKTRLPWGIELPFDTNYVCYVWFDALISYISALNWPTGEYYKTFWPGEHLIAKDILKPHAVFWPTMLKSAGLPMYKHLNVHGYWLNRDTKMSKSLNNAIDPITLIQQYGLDAFRYFLIREMNFGSDANFSEESLKHRINSDLANDLGNLFNRVLSMSTKYFKSLLPEAKEYTEPDMQLRQLTENAQYNYIQLMKNMRLSQAVEALWELIRALNKYIDTQAPWKLFKEGQTDRLKTVIRLTLECMRKVAISLWPIMPEITITMLKQLGISTSKSKKYGNIPTTCINNDIHAWEQLTTGTMLAPTSNLFPRIELKEEISDKENKMSFQSNGSQPSIYEQEEISFNDLQKVEIRIGTIVEASKHPNADNLLCFSIDIGENKPRQILSGIAQQYTPESMLGKQVCVVTNLAPKKIRGIESQGMILFAKTPSGLSLVTVESPVPTGSIVS

SEQ ID NO: 11429 - protein, 316 aa, Lawsonia intracellularis
MKRILNTSFRPHGKKDIFFCEDPFIMKGDKVVVELEQGISLTQVVDILQSLPNSIDPLTVPSIIRKATQKDLEQVNKNKEFSKNAFAFCKSCIHEHQLPMKLVDVEITLDQSKYIFYFTAPNRIDFRDLIKDLIREYHAKIELRQIGERHETQLTGAIGNCGRVCCCRRFLKDFSPVSIKMAKEQNVFLNPSKISGSCGKLLCCLSYEQENYQIFNKQSPKIGKRYQTDQGSLKVIRTNLFKNTITVLNMSNEEIEYTLEEWDKLHPTHTTPQTIKQNIPHQNKTSHPSSDFLTLLSDHDTNKIDDNSLDTILTES

SEQ ID NO: 11430 - protein, 205 aa, Lawsonia intracellularis
MSIAKFFSNQTALLWKFMSYFQPPVVRILHIVITLLIVINLILGYGFLCSTKNPDTYIICSSLLWVHISIGILLTLLTLLFIPACLFHRGIRHFYPYLWGDTKQLIKDLKVSLSFKLIPPTSGGLAAVVQGLGLGALLLTELAGIIWFIGWQTDGLYAHFFKEVHKVSATLLALYLLGHGTMATIHFIVWQRRVARKKMRQKKSD

SEQ ID NO: 11431 - protein, 199 aa, Lawsonia intracellularis
MIAYLEGYIAEFGETSCVVATSSGIGYEVFLTTPTRSTLPNKGEQVRFYICHIVREDIQELFGFETWDERQTFIVLTSISKVGARTALNMLSTFRPNDLRQCVIEEDIFALTRVSGIGKKTAQHIFLELKYKLQIDGNSTTSSSPSIGQSLFYDILTGLQGLGYTKEESSVVIKSVLQHEPDLDVGSALRRCLKQLVKG

SEQ ID NO: 11432 - protein, 341 aa, Lawsonia intracellularis
MSETAGKGVTMPEIMQSSYPDETLYREKDDSIRPSRLDDFIGQEELRENLKVFLNAARDRGQAMDHTLFYGNPGLGKTTLAQIIAAELGVNLICTSGPVLERSGDLAAILTNLSKHDILFVDEIHRMPITVEEILYPALEDYKLDLVIGQGPAARTVKIELEPFTLVGATTRIGLISSPLRDRFGIISRLEFYTPEELSQIILRTSRILNVPITKKGAIEIGRRSRGTPRIANRLLRRVRDFAAVFGSATVDEELVNHALQKLDVDEKGLDQMDRKLLTVLIELFAGGPVGIKTLAVACSEEVRTIEDIYEPYLIQCGFMKRTPRGRMATVKAYKHLNLTD

SEQ ID NO: 11433 - protein, 240 aa, Lawsonia intracellularis
MPGVTPRVELLSYTPEPLSVIYASFRQCYHAGFVGDMWKKLLDGEIPKEKQASFIHSLIESGHTSPIEHVSFTFAISGVSRALTHQLIRHRLASYSQQSQRYVDGSKFEYIVPPSIAKDPKALEKFTELMERIGEDYRELKALLESGKRTASSIEDARFVLPQAAATNIVMTMNCRALLNFFEHRCCFRAQWEIRNVAYMMLKHCRMIIPAIFDPAGAKCERLQYCPEGEKYTCGLYPVR
